(19) United States
(12) Patent Application Publication
(10) Pub. No.: US 2018/0291393 A1
(43) Pub. Date: Oct. 11, 2018

(54) PLANTS HAVING ENHANCED YIELD-RELATED TRAITS AND PRODUCING METHODS THEREOF

(71) Applicant: BASF Plant Science Company GmbH, Ludwigshafen (DE)

(72) Inventors: Marieke Louwers, Gent (BE); Christophe Reuzeau, La Chapelle Gonaguet (FR); Ana Isabel Sanz Molinero, Madrid (ES); Yves Hatzfeld, Lille (FR)

(21) Appl. No.: 15/877,863

(22) Filed: Jan. 23, 2018

Related U.S. Application Data
(63) Continuation of application No. 14/001,804, filed on Aug. 27, 2013, now abandoned.
(60) Provisional application No. 61/478,068, filed on Apr. 22, 2011.
(60) Provisional application No. 61/447,127, filed on Feb. 28, 2011.
(60) Provisional application No. 61/447,119, filed on Feb. 28, 2011.

(30) Foreign Application Priority Data
Feb. 28, 2011 (EP) 11156187.4
Feb. 28, 2011 (EP) 11156244.3
Apr. 22, 2011 (EP) 11163577.7

(51) Int. Cl. C12N 15/82; C07K 14/415

(52) U.S. Cl. CPC C12N 15/8261; Y02A 40/146; C07K 14/415; C12N 15/8273

(57) ABSTRACT

The present invention relates generally to the field of molecular biology and concerns a method for enhancing various economically important yield-related traits in plants. More specifically, the present invention concerns a method for enhancing yield-related traits in plants by modulating expression in a plant of a nucleic acid encoding an DUF642 (Protein containing a Domain of Unknown Function) polypeptide, or an epimerase-related like polypeptide, or a Phospholipase/carboxylesterase (PLPCase) polypeptide. The present invention also concerns plants having modulated expression of a nucleic acid encoding a DUF642 polypeptide, or an epimerase-related like polypeptide, or a PLPCase polypeptide, which plants have enhanced yield-related traits relative to control plants. The invention also provides hitherto unknown POI-encoding nucleic acids DUF642-encoding nucleic acids, or epimerase-related like polypeptides, or PLPCase-encoding nucleic acids, and constructs comprising the same, useful in performing the methods of the invention.

### RELATED APPLICATIONS

[0001] This application is a continuation of U.S. application Ser. No. 14/001,804, filed Aug. 27, 2013, which is a national stage application (under 35 U.S.C. § 371) of PCT/IB2012/050878, filed Feb. 27, 2012, which claims benefit of U.S. Provisional Application No. 61/447,119, filed Feb. 28, 2011; U.S. Provisional Application No. 61/447,127, filed Feb. 28, 2011; European Application No. 11156244.3, filed Feb. 28, 2011; European Application No. 11156187.4, filed Feb. 28, 2011; U.S. Provisional Application No. 61/478,068, filed Apr. 22, 2011, and European Application No. 11163577.7, filed Apr. 22, 2011.

### SUBMISSION OF SEQUENCE LISTING

[0002] The Sequence Listing associated with this application is filed in electronic format via EFS-Web and hereby incorporated by reference into the specification in its entirety. The name of the text file containing the Sequence Listing is 074021_0225_01_ST25. The size of the text file is 834,958 bytes and the text file was created on Jan. 22, 2018.

### BACKGROUND

[0003] The present invention relates generally to the field of molecular biology and concerns a method for enhancing yield-related traits in plants by modulating expression in a plant of a nucleic acid encoding a DUF642 (Protein containing a Domain of Unknown Function) polypeptide. The present invention also concerns plants having modulated expression of a nucleic acid encoding a DUF642 polypeptide, which plants have enhanced yield-related traits relative to corresponding wild type plants or other control plants. The invention also provides constructs useful in the methods of the invention.

[0004] The present invention furthermore concerns a method for enhancing yield-related traits in plants by modulating expression in a plant of a nucleic acid encoding an epimerase-related like polypeptide. The present invention also concerns plants having modulated expression of a nucleic acid encoding an epimerase-related like polypeptide, which plants have enhanced yield-related traits relative to corresponding wild type plants or other control plants. The invention also provides constructs useful in the methods of the invention.

[0005] The present invention also concerns a method for enhancing yield-related traits in plants by modulating expression in a plant of a nucleic acid encoding a Phospholipase/carboxylesterase (PLPCase) polypeptide. The present invention also concerns plants having modulated expression of a nucleic acid encoding a PLPCase polypeptide, which plants have enhanced yield-related traits relative to corresponding wild type plants or other control plants. The invention also provides constructs useful in the methods of the invention.

[0006] The ever-increasing world population and the dwindling supply of arable land available for agriculture fuels research towards increasing the efficiency of agriculture. Conventional means for crop and horticultural improvements utilise selective breeding techniques to identify plants having desirable characteristics. However, such selective breeding techniques have several drawbacks, namely that these techniques are typically labour intensive and result in plants that often contain heterogeneous genetic components that may not always result in the desirable trait being passed on from parent plants. Advances in molecular biology have allowed mankind to modify the germplasm of animals and plants. Genetic engineering of plants entails the isolation and manipulation of genetic material (typically in the form of DNA or RNA) and the subsequent introduction of that genetic material into a plant. Such technology has the capacity to deliver crops or plants having various improved economic, agronomic or horticultural traits.

[0007] A trait of particular economic interest is increased yield. Yield is normally defined as the measurable produce of economic value from a crop. This may be defined in terms of quantity and/or quality. Yield is directly dependent on several factors, for example, the number and size of the organs, plant architecture (for example, the number of branches), seed production, leaf senescence and more. Root development, nutrient uptake, stress tolerance and early vigour may also be important factors in determining yield. Optimizing the abovementioned factors may therefore contribute to increasing crop yield.

[0008] Seed yield is a particularly important trait, since the seeds of many plants are important for human and animal nutrition. Crops such as corn, rice, wheat, canola and soybean account for over half the total human caloric intake, whether through direct consumption of the seeds themselves or through consumption of meat products raised on processed seeds. They are also a source of sugars, oils and many kinds of metabolites used in industrial processes. Seeds contain an embryo (the source of new shoots and roots) and an endosperm (the source of nutrients for embryo growth during germination and during early growth of seedlings). The development of a seed involves many genes, and requires the transfer of metabolites from the roots, leaves and stems into the growing seed. The endosperm, in particular, assimilates the metabolic precursors of carbohydrates, oils and proteins and synthesizes them into storage macromolecules to fill out the grain.

[0009] Another important trait for many crops is early vigour. Improving early vigour is an important objective of modern rice breeding programs in both temperate and tropical rice cultivars. Long roots are important for proper soil anchorage in water-seeded rice. Where rice is sown directly into flooded fields, and where plants must emerge rapidly through water, longer shoots are associated with vigour. Where drill-seeding is practiced, longer mesocotyls and coleoptiles are important for good seedling emergence. The ability to engineer early vigour into plants would be of great importance in agriculture. For example, poor early vigour has been a limitation to the introduction of maize (Zea mays L.) hybrids based on Corn Belt germplasm in the European Atlantic.

[0010] A further important trait is that of improved abiotic stress tolerance. Abiotic stress is a primary cause of crop loss worldwide, reducing average yields for most major crop plants by more than 50% (Wang et al., Planta 218, 1-14, 2003). Abiotic stresses may be caused by drought, salinity, extremes of temperature, chemical toxicity and oxidative stress. The ability to improve plant tolerance to abiotic stress would be of great economic advantage to farmers worldwide and would allow for the cultivation of crops during adverse conditions and in territories where cultivation of crops may not otherwise be possible.

[0011] Crop yield may therefore be increased by optimising one of the above-mentioned factors.

[0012] Concerning DUF642 polypeptides, the family of DUF642 proteins represents a conserved region found in a number of uncharacterised plant proteins. DUF642 proteins were identified e.g. by Irshad et al., BMC Plant Biology 2008, 8:94.

[0013] Concerning epimerase-related like polypeptides, the present invention relates to the use of epimerase-related like polynucleotides and polypeptides in the field of plant biotechnology. Epimerases can be defined as isomerase enzymes that catalyze the inversion of stereochemistry in biological molecules.

[0014] Ascencio-Ibáñez et al. (2008, Plant Physiology 148(1):436-454) have reported amongst genes that are significantly changed during CalCuV injection an Arabodopsis epimerase gene, which is listed in a supplemental table (Table 2) of this paper. In this paper, the Arabidopsis gene is called a “Putative protein Isopenicillin-N-epimerase”. The authors described microarray analyses ohow dof the Arabidopsis (Arabidopsis thaliana) transcriptome in response to cabbage leaf curl virus (CaLCuV) infection, and indicated that they uncovered 5,365 genes (false discovery rate <0.005) differentially expressed in infected rosette leaves at 12 days postinoculation, including an Arabidopsis isomerase gene (At3g62130).

[0015] Mehta and Christen (1994 Biochem. Biophys. Res. Commun. 14; 198(1):138-43) described the homology of isopenicillin-N-epimerases to aminotransferases.

[0016] Concerning PLPCase polypeptides, the PLPCase polypeptide family contains both phospholipases and carboxylesterases with broad substrate specificity, and is structurally related to alpha/beta hydrolases. Members of the PLPCase superfamily are present in plants, but also in other organisms such as yeast and bacteria. In Arabidopsis, SOBER1 gene encoding a PLPCase is involved in resistance to plant pathogen P. synringae pv tomato DC3000 (Kirik and Mudgett (2009), PNAS 106 (48): 20532-20537). Recent studies showed that PLPCase might have arisen from rare horizontal gene transfer from fungi to plant (Richards et al. (2009), The Plant Cell, 21(7): 1897-1911).

[0017] Depending on the end use, the modification of certain yield traits may be favoured over others. For example for applications such as forage or wood production, or bio-fuel resource, an increase in the vegetative parts of a plant may be desirable, and for applications such as flour, starch or oil production, an increase in seed parameters may be particularly desirable. Even amongst the seed parameters, some may be favoured over others, depending on the application. Various mechanisms may contribute to increasing seed yield, whether that is in the form of increased seed size or increased seed number.

[0018] It has now been found that various yield-related traits may be improved in plants by modulating expression in a plant of a nucleic acid encoding a DUF642 polypeptide, or an epimerase-related like polypeptide, or a PLPCase polypeptide in a plant.

### DETAILED DESCRIPTION OF THE INVENTION

[0019] The present invention shows that modulating expression in a plant of a nucleic acid encoding a DUF642 polypeptide, or an epimerase-related like polypeptide, or a PLPCase polypeptide gives plants having enhanced yield-related traits relative to control plants.

[0020] According to a first embodiment, the present invention provides a method for enhancing yield-related traits in plants relative to control plants, comprising modulating expression in a plant of a nucleic acid encoding a DUF642 polypeptide, or an epimerase-related like polypeptide, or a PLPCase polypeptide and optionally selecting for plants having enhanced yield-related traits. According to another embodiment, the present invention provides a method for producing plants having enhanced yield-related traits relative to control plants, wherein said method comprises the steps of modulating expression in said plant of a nucleic acid encoding a DUF642 polypeptide, or an epimerase-related like polypeptide, or a PLPCase polypeptide as described herein and optionally selecting for plants having enhanced yield-related traits.

[0021] A preferred method for modulating (preferably, increasing) expression of a nucleic acid encoding a DUF642 polypeptide, or an epimerase-related like polypeptide, or a PLPCase polypeptide is by introducing and expressing in a plant a nucleic acid encoding a DUF642 polypeptide, or an epimerase-related like polypeptide, or a PLPCase polypeptide.

[0022] Any reference hereinafter to a “protein useful in the methods of the invention” is taken to mean a DUF642 polypeptide, or an epimerase-related like polypeptide, or a PLPCase polypeptide as defined herein. Any reference hereinafter to a “nucleic acid useful in the methods of the invention” is taken to mean a nucleic acid capable of encoding such a DUF642 polypeptide, or an epimerase-related like polypeptide, or a PLPCase polypeptide. The nucleic acid to be introduced into a plant (and therefore useful in performing the methods of the invention) is any nucleic acid encoding the type of protein which will now be described, hereafter also named “DUF642 nucleic acid”, or “epimerase-related like nucleic acid”, or “PLPCase nucleic acid” or “DUF642 gene”, or “epimerase-related like gene”, or “PLPCase gene”.

[0023] A “DUF642 polypeptide” as defined herein refers to any polypeptide comprising an InterPro accession IPRO06946 DUF642 domain, preferably said DUF642 polypeptide comprises the signature sequence FSAARTCAQ (SEQ ID NO: 194).

[0024] The term “DUF642” or “DUF642 polypeptide” as used herein also intends to include homologues as defined hereunder of “DUF642 polypeptide”.

[0025] Preferably, the DUF642 polypeptide polypeptide comprises one or more of the following motifs:

(i) Motif 1:
(SEQ ID NO: 181)
N[LAM][VL]KNG[DG]FEEGP[WYH][MI][FLI]P[NG][TS]
[STR][WL]GVL[LVI]P[PTS][NKM][LQDV][EDV][DE][ED]
[THY]S[PS]L[PS][GP]W[IMT][IV],
(ii) Motif 2:
(SEQ ID NO: 182)
[VLA][EKAT][KPR]G[SAM][LRH]Y[SA][LIV][TI]F[SG]A[AS]
RTCAQ[DLAS]E[SVRL]L[NR][VI],
(iii) Motif 3:
(SEQ ID NO: 183)
D[PE][AT[CGP]LI][IL[D]AS[VIF]AI[KR]

[0026] More preferably, the DUF642 polypeptide comprises one or more of the following motifs:

(i) Motif 4:
(SEQ ID NO: 184)
N[ML][LV][KR]NG[DG]FEEGPY[IF][FLI]P[GND][TA][SPR]
WGVL[VI]P[PS][MN][DIV][EV],
(ii) Motif 5:
(SEQ ID NO: 185)
N[VI][ST][VAI][SAT][PG][EQ][SW][GA][VE][LI]P[IM]QT
[VIM]Y[TGS]S[SN]GWDSY[SA]WA[FW],
(iii) Motif 6:
(SEQ ID NO: 186)
Y[SA][IL][TI]FSAARTCAQ[AS]E

[0027] Even more preferably, the DUF642 polypeptide comprises in increasing order of preference, at least 2, at least 3, at least 4, at least 5, or all 6 motifs.

[0028] Motifs 1 to 6 were derived using the MEME algorithm (Bailey and Elkan, Proceedings of the Second International Conference on Intelligent Systems for Molecular Biology, pp. 28-36, AAAI Press, Menlo Park, Calif., 1994). At each position within a MEME motif, the residues are shown that are present in the query set of sequences with a frequency higher than 0.2. Residues within square brackets represent alternatives.

[0029] Additionally or alternatively, the homologue of a DUF642 protein has in increasing order of preference at least 29%, 30%, 31%, 32%, 33%, 34%, 35%, 36%, 37%, 38%, 39%, 40%, 41%, 42%, 43%, 44%, 45%, 46%, 47%, 48%, 49%, 50%, 51%, 52%, 53%, 54%, 55%, 56%, 57%, 58%, 59%, 60%, 61%, 62%, 63%, 64%, 65%, 66%, 67%, 68%, 69%, 70%, 71%, 72%, 73%, 74%, 75%, 76%, 77%, 78%, 79%, 80%, 81%, 82%, 83%, 84%, 85%, 86%, 87%, 88%, 89%, 90%, 91%, 92%, 93%, 94%, 95%, 96%, 97%, 98%, or 99% overall sequence identity to the amino acid represented by SEQ ID NO: 2 or 4, provided that the homologous protein comprises any one or more of the conserved motifs as outlined above. The overall sequence identity is determined using a global alignment algorithm, such as the Needleman Wunsch algorithm in the program GAP (GCG Wisconsin Package, Accelrys), preferably with default parameters and preferably with sequences of mature proteins (i.e. without taking into account secretion signals or transit peptides).

[0030] In one embodiment the sequence identity level is determined by comparison of the polypeptide sequences over the entire length of the sequence of SEQ ID NO: 2 or SEQ ID NO: 4.

[0031] Compared to overall sequence identity, the sequence identity will generally be higher when only conserved domains or motifs are considered. Preferably the motifs in a DUF642 polypeptide have, in increasing order of preference, at least 70%, 71%, 72%, 73%, 74%, 75%, 76%, 77%, 78%, 79%, 80%, 81%, 82%, 83%, 84%, 85%, 86%, 87%, 88%, 89%, 90%, 91%, 92%, 93%, 94%, 95%, 96%, 97%, 98%, or 99% sequence identity to any one or more of the motifs represented by SEQ ID NO: 181 to SEQ ID NO: 186 (Motifs 1 to 6).

[0032] In other words, in another embodiment a method is provided wherein said DUF642 polypeptide comprises a conserved domain (or motif) with at least 70%, 71%, 72%, 73%, 74%, 75%, 76%, 77%, 78%, 79%, 80%, 81%, 82%, 83%, 84%, 85%, 86%, 87%, 88%, 89%, 90%, 91%, 92%, 93%, 94%, 95%, 96%, 97%, 98%, or 99% sequence identity to the conserved motifs starting with amino acid 202 up to amino acid 241 (motif 1), amino acid 108 up to amino acid 132 (motif 2), amino acid 178 up to amino acid 191 (motif 3) in SEQ ID NO:2; the conserved motifs starting with amino acid 202 up to amino acid 230 (motif 4), amino acid 130 up to amino acid 159 (motif 5), amino acid 114 up to amino acid 128 (motif 6) in SEQ ID NO:2; the conserved motifs starting with amino acid 121 up to amino acid 160 (motif 1), amino acid 27 up to amino acid 51 (motif 2), amino acid 97 up to amino acid 110 (motif 3) in SEQ ID NO:4; the conserved motifs starting with amino acid 121 up to amino acid 149 (motif 4), amino acid 50 up to amino acid 78 (motif 5), amino acid 33 up to amino acid 47 (motif 6) in SEQ ID NO:4.

[0033] An “epimerase-related like polypeptide” or “epimerase-related like protein” as defined herein refers to any polypeptide having an amino acid sequence which comprises one or more of the following motifs:

(i) Motif 7:
(SEQ ID NO: 273)
CREEGV[DE][QK]VFVD[AG]AH[AS]IG[QSC]V[PDE][VI][DN]
[VM][KR][ED]IGADFY[TV]SNLHKWFFCPP[SA]VAFL[YH],
(ii) Motif 8:
(SEQ ID NO: 274)
EF[SA]HHP[GAN]VAR[IV]NNGSFG[CS]CP[AG]S[VI][LI]AAQ
[ARK][RN]WQ[LR][LRQ[FL]RQA[QPD]AD[FYF]ND[xL]QRK
[PK]G,
(iii)Motif 9:
(SEQ ID NO: 275)
S[LI]VDNATTAAAIVLQ[VAI][AG][WR][AS]FAEG[RKN]FA[KR]
[GN]D[AVT]V[LV]MLH[YC]AY[GQ][AS]VKKSI[EQH]AYV

[0034] Motifs 7 to 9 were derived using the MEME algorithm (Bailey and Elkan, Proceedings of the Second International Conference on Intelligent Systems for Molecular Biology, pp. 28-36, AAAI Press, Menlo Park, Calif., 1994). At each position within a MEME motif, the residues are shown that are present in the query set of sequences with a frequency higher than 0.2. Residues within square brackets represent alternatives.

[0035] More preferably, the epimerase-related like polypeptide comprises in increasing order of preference, at least 1, at least 2, or all 3 motifs.

[0036] In another embodiment, an epimerase-related like polypeptide as used herein comprises a polypeptide having one or more of the domains as listed in Table C, and in particular having one or more of the following domains:
[0037] a domain as determined with the superfamily database and having accession number SSF53383;
[0038] a domain as determined with the HMMPanther database and having accession number as PTHR11601
[0039] a domain as determined with the HMMPfam database and having accession number PF00266; and
[0040] a domain as determined with the Gene3D database and having accession number G3DSA:3.40.640.10

[0041] In another preferred embodiment, an epimerase-related like polypeptide as used herein comprises a conserved domain (or motif) with at least 50%, 51%, 52%, 53%, 54%, 55%, 56%, 57%, 58%, 59%, 60%, 61%, 62%, 63%, 64%, 65%, 66%, 67%, 68%, 69%, 70%, 71%, 72%, 73%, 74%, 75%, 76%, 77%, 78%, 79%, 80%, 81%, 82%, 83%, 84%, 85%, 86%, 87%, 88%, 89%, 90%, 91%, 92%, 93%, 94%, 95%, 96%, 97%, 98%, 99% sequence identity to or consists of a conserved domain as represented by any one of:
[0042] amino acid coordinates 32 to 449 in SEQ ID NO: 198 (motif 10—SEQ ID NO: 280);
[0043] amino acid coordinates 47 to 276 in SEQ ID NO: 198 (motif 11—SEQ ID NO: 281);
[0044] amino acid coordinates 92 to 364 in SEQ ID NO: 198 (motif 12—SEQ ID NO: 282); and
[0045] amino acid coordinates 59 to 323 in SEQ ID NO: 198 (motif 13—SEQ ID NO: 283).

[0046] The term “epimerase-related like polypeptide” as used herein also intends to include homologues as defined hereunder of an “epimerase-related like polypeptide”.

[0047] Additionally or alternatively, the homologue of an epimerase-related like protein has in increasing order of preference at least 40%, 41%, 42%, 43%, 44%, 45%, 46%, 47%, 48%, 49%, 50%, 51%, 52%, 53%, 54%, 55%, 56%, 57%, 58%, 59%, 60%, 61%, 62%, 63%, 64%, 65%, 66%, 67%, 68%, 69%, 70%, 71%, 72%, 73%, 74%, 75%, 76%, 77%, 78%, 79%, 80%, 81%, 82%, 83%, 84%, 85%, 86%, 87%, 88%, 89%, 90%, 91%, 92%, 93%, 94%, 95%, 96%, 97%, 98%, or 99% overall sequence identity to the amino acid represented by SEQ ID NO: 198, provided that the homologous protein comprises any one or more of the conserved motifs or domains as outlined above. The overall sequence identity is determined using a global alignment algorithm, such as the Needleman Wunsch algorithm in the program GAP (GCG Wisconsin Package, Accelrys), preferably with default parameters and preferably with sequences of mature proteins (i.e. without taking into account secretion signals or transit peptides).

[0048] In one embodiment the sequence identity level is determined by comparison of the polypeptide sequences over the entire length of the sequence of SEQ ID NO: 198.

[0049] Compared to overall sequence identity, the sequence identity will generally be higher when only conserved domains or motifs are considered. Preferably the motifs in an epimerase-related like polypeptide have, in increasing order of preference, at least 70%, 71%, 72%, 73%, 74%, 75%, 76%, 77%, 78%, 79%, 80%, 81%, 82%, 83%, 84%, 85%, 86%, 87%, 88%, 89%, 90%, 91%, 92%, 93%, 94%, 95%, 96%, 97%, 98%, or 99% sequence identity to any one or more of the motifs 1 to 7 (as represented by SEQ ID NO 273, 274, 275, 280, 281, 282, 283, respectively) as described above.

[0050] A “PLPCase polypeptide” as defined herein refers to any polypeptide comprising an InterPro accession IPR003140 corresponding to PFAM accession number PF022030 Phospholipase/carboxylesterase (PLPCase) domain.

[0051] The term “PLPCase” or “PLPCase polypeptide” as used herein also intends to include homologues as defined hereunder of “PLPCase polypeptide”.

[0052] In a preferred embodiment, the PLPCase polypeptide comprises one or more of the following motifs:

(i) Motif 14:
(SEQ ID NO: 348)
E[FY]G[KR]T[HY]VVRPKG[KR]HQATIVWLHGLGDNG[LSA]S[SW]
SQLL[ED][ST]LPLPNIKWICPTA,
(ii) Motif 15:
(SEQ ID NO: 349)
PDD[WIVL]EGLDASAAH[IV]ANLLS[TS]EP[AS]D[VI]K[VL]G[
IV]G,
(iii) Motif 16:
(SEQ ID NO: 350)
FSMGAA[IT]ALYSA[TA]C[YF]A[MHL]

[0053] In a more preferred embodiment, the PLPCase polypeptide comprises one or more of the following motifs:

(i) Motif 17:
(SEQ ID NO: 351)
E[FY]G[KR]T[HY]VVRPKGKH[QK]ATIVWLHGLGDNG[LS]S[SW]
SQLLE[ST]LPLPNIKWICPTA
(ii) Motif 18:
(SEQ ID NO: 352)
ED[GA]PDD[WLV]EGLDA[SA]AAH[IV]ANLLSTEPA[DN][VI]K
(iii) Motif 19:
(SEQ ID NO: 353)
[LF]GGFP[CS]TAWFD

[0054] In an alternative preferred embodiment, the PLPCase polypeptide comprises one or more of the following motifs:

(i) Motif 20:
(SEQ ID NO: 354)
T[HY]VVRPKG[KR]HQATIVWLHG[LI]GDNG[LAG]S[SW]SQLL
[ED]SLPLPN[IV]KWICPTAP[TS]RP
(ii) Motif 21:
(SEQ ID NO: 355)
FPCTAWFDV[GE][ED][LT]S[ELV]DG[PHR]DD[WI]EG[LM]DASA
[AS]H[IV]ANLLS[TS]EP[AS]DV[KS][VL]GIGGFSM
(iii) Motif 22:
(SEQ ID NO: 356)
FK[SP]Y[END]G[IL]GHYT[VI]P[RE]EM[GD][ED]V[SC][TKN]

[0055] In a most preferred embodiment, the PLPCase polypeptide comprises one or more of the following motifs:

(i) Motif 23:
(SEQ ID NO: 357)
EFG[KR]T[HY]VVRPKGKHQATIVWLHGLGDNG[LS]SS[SY]QLLES
LPLPNIKWICPTA
(ii) Motif 24:
(SEQ ID NO: 358)
SEDG[PH]DDWEGLDASA[AS]HIANLLSTEPADV
(iii) Motif 25:
(SEQ ID NO: 259)
G[IT]SDDVV[LP]Y[KR][YF]GEKSAQSLS[SM]AGFRY[VI][AMT]
FK[SP]Y

[0056] Motifs 14 to 25 were derived using the MEME algorithm (Bailey and Elkan, Proceedings of the Second International Conference on Intelligent Systems for Molecular Biology, pp. 28-36, AAAI Press, Menlo Park, Calif., 1994). At each position within a MEME motif, the residues are shown that are present in the query set of sequences with a frequency higher than 0.2. Residues within square brackets represent alternatives. More preferably, the PLPCase polypeptide comprises in increasing order of preference, at least 2, at least 3, at least 4, at least 5, at least 6, at least 7, at least 8, at least 9, at least 10, at least 11, or all 12 motifs.

[0057] Additionally or alternatively, the homologue of a PLPCase protein has in increasing order of preference at least 25%, 26%, 27%, 28%, 29%, 30%, 31%, 32%, 33%, 34%, 35%, 36%, 37%, 38%, 39%, 40%, 41%, 42%, 43%, 44%, 45%, 46%, 47%, 48%, 49%, 50%, 51%, 52%, 53%, 54%, 55%, 56%, 57%, 58%, 59%, 60%, 61%, 62%, 63%, 64%, 65%, 66%, 67%, 68%, 69%, 70%, 71%, 72%, 73%, 74%, 75%, 76%, 77%, 78%, 79%, 80%, 81%, 82%, 83%, 84%, 85%, 86%, 87%, 88%, 89%, 90%, 91%, 92%, 93%, 94%, 95%, 96%, 97%, 98%, or 99% overall sequence identity to the amino acid represented by SEQ ID NO: 285, provided that the homologous protein comprises any one or more of the conserved motifs as outlined above. The overall sequence identity is determined using a global alignment algorithm, such as the Needleman Wunsch algorithm in the program GAP (GCG Wisconsin Package, Accelrys), preferably with default parameters and preferably with sequences of mature proteins (i.e. without taking into account secretion signals or transit peptides). Compared to overall sequence identity, the sequence identity will generally be higher when only conserved domains or motifs are considered. Preferably the motifs in a PLPCase polypeptide have, in increasing order of preference, at least 70%, 71%, 72%, 73%, 74%, 75%, 76%, 77%, 78%, 79%, 80%, 81%, 82%, 83%, 84%, 85%, 86%, 87%, 88%, 89%, 90%, 91%, 92%, 93%, 94%, 95%, 96%, 97%, 98%, or 99% sequence identity to any one or more of the motifs represented by SEQ ID NO: 348 to SEQ ID NO: 359 (Motifs 14 to 25).

[0058] In another preferred embodiment a method is provided wherein said PLPCase polypeptide comprises a conserved domain (or motif) with at least 70%, 71%, 72%, 73%, 74%, 75%, 76%, 77%, 78%, 79%, 80%, 81%, 82%, 83%, 84%, 85%, 86%, 87%, 88%, 89%, 90%, 91%, 92%, 93%, 94%, 95%, 96%, 97%, 98%, or 99% sequence identity to the conserved domain starting with amino acid 20 up to amino acid 69 and/or amino acid 92 to amino acid 118 and/or amino acid 194 to amino acid 225 in SEQ ID NO:285).

[0059] The terms “domain”, “signature” and “motif” are defined in the “definitions” section herein.

[0060] Preferably, the polypeptide sequence which when used in the construction of a phylogenetic tree, such as the one depicted in FIG. 5, clusters with the group of DUF642 polypeptides comprising the amino acid sequence represented by SEQ ID NO: 2 and/or 4 rather than with any other group.

[0061] In addition, DUF642 polypeptides, when expressed in rice according to the methods of the present invention as outlined in Examples 6 and 7, give plants having increased yield related traits, in particular when grown under non-stress conditions, total seed yield (Totalwgseeds), number of seeds (nrfilledseed), seed fill rate (filtrate), harvest index, greenness before flowering, total number of seeds (nrtotalseed) and for aboveground biomass (AreaMax).

[0062] Preferably, the polypeptide sequence which when used in the construction of a phylogenetic tree, such as the one depicted in FIG. 9, clusters with the group of epimerase-related like polypeptides comprising the amino acid sequence represented by SEQ ID NO: 198 rather than with any other group.

[0063] In addition, epimerase-related like polypeptides, when expressed in rice according to the methods of the present invention as outlined in Examples 6 and 7, give plants having increased yield related traits, in particular increased biomass and/or increase seed yield, and more particularly any one or more of increased total weight of seeds, harvest index, fill rate, thousand kernel weight (TKW), above ground biomass, and number of filled seeds.

[0064] Preferably, the polypeptide sequence which when used in the construction of a phylogenetic tree, such as the one depicted in FIG. 14, clusters with the group of PLPCase polypeptides comprising the amino acid sequence represented by SEQ ID NO: 285 rather than with any other group.

[0065] Furthermore, PLPCase polypeptides (at least in their native form) typically have phospholipase and/or carboxylesterase activity. Tools and techniques for measuring phospholipase and/or carboxylesterase activity are well known in the art, as e.g. Kirilc and Mudgett (2009), PNAS 106 (48): 20532-20537.

[0066] In addition, PLPCase polypeptides, when expressed in rice according to the methods of the present invention as outlined in Examples 6 and 7, give plants having increased yield related traits, in particular increased root biomass and greenness index.

[0067] In one embodiment of the present invention the function of the nucleic acid sequences of the invention is to confer information for a protein that increases yield or yield related traits, when a nucleic acid sequence of the invention is transcribed and translated in a living plant cell.

[0068] In one embodiment of the present invention the function of the nucleic acid sequences of the invention is to confer information for synthesis of the PLPCase polypeptides that increases yield or yield related traits, when such a nucleic acid sequence of the invention is transcribed and translated in a living plant cell.

[0069] The present invention is illustrated by transforming plants with the nucleic acid sequence represented by SEQ ID NO: 1, encoding the polypeptide sequence of SEQ ID NO: 2. However, performance of the invention is not restricted to these sequences; the methods of the invention may advantageously be performed using any DUF642-encoding nucleic acid or DUF642 polypeptide as defined herein.

[0070] Examples of nucleic acids encoding DUF642 polypeptides are given in Table A1 of the Examples section herein. Such nucleic acids are useful in performing the methods of the invention. The amino acid sequences given in Table A1 of the Examples section are example sequences of orthologues and paralogues of the DUF642 polypeptide represented by SEQ ID NO: 2, the terms “orthologues” and “paralogues” being as defined herein. Further orthologues and paralogues may readily be identified by performing a so-called reciprocal blast search as described in the definitions section; where the query sequence is SEQ ID NO: 1 or SEQ ID NO: 2; or SEQ ID NO: 3 or SEQ ID NO: 4, the second BLAST (back-BLAST) would be against rice sequences.

[0071] The invention also provides hitherto unknown DUF642-encoding nucleic acids and DUF642 polypeptides useful for conferring enhanced yield-related traits in plants relative to control plants.

[0072] According to a further embodiment of the present invention, there is therefore provided an isolated nucleic acid molecule selected from:
[0073] (i) a nucleic acid represented by SEQ ID NO: 33, 39, 91, 169, 171, 175;
[0074] (ii) the complement of a nucleic acid represented by SEQ ID NO: 33, 39, 91, 169, 171, 175;
[0075] (iii) a nucleic acid encoding a DUF642 polypeptide having in increasing order of preference at least 50%, 51%, 52%, 53%, 54%, 55%, 56%, 57%, 58%, 59%, 60%, 61%, 62%, 63%, 64%, 65%, 66%, 67%, 68%, 69%, 70%, 71%, 72%, 73%, 74%, 75%, 76%, 77%, 78%, 79%, 80%, 81%, 82%, 83%, 84%, 85%, 86%, 87%, 88%, 89%, 90%, 91%, 92%, 93%, 94%, 95%, 96%, 97%, 98%, or 99% sequence identity to the amino acid sequence represented by SEQ ID NO: 34, 40, 92, 170, 172, 176, and additionally or alternatively comprising one or more motifs having in increasing order of preference at least 50%, 55%, 60%, 65%, 70%, 75%, 80%, 85%, 90%, 95%, 96%, 97%, 98%, 99% or more sequence identity to any one or more of the motifs given in SEQ ID NO: 181 to SEQ ID NO: 186, and further preferably conferring enhanced yield-related traits relative to control plants.
[0076] (iv) a nucleic acid molecule which hybridizes with a nucleic acid molecule of (i) to (iii) under high stringency hybridization conditions and preferably confers enhanced yield-related traits relative to control plants.

[0077] According to a further embodiment of the present invention, there is also provided an isolated polypeptide selected from:
[0078] (i) an amino acid sequence represented by SEQ ID NO: 34, 40, 92, 170, 172, 176;
[0079] (ii) an amino acid sequence having, in increasing order of preference, at least 50%, 51%, 52%, 53%, 54%, 55%, 56%, 57%, 58%, 59%, 60%, 61%, 62%, 63%, 64%, 65%, 66%, 67%, 68%, 69%, 70%, 71%, 72%, 73%, 74%, 75%, 76%, 77%, 78%, 79%, 80%, 81%, 82%, 83%, 84%, 85%, 86%, 87%, 88%, 89%, 90%, 91%, 92%, 93%, 94%, 95%, 96%, 97%, 98%, or 99% sequence identity to the amino acid sequence represented by SEQ ID NO: 34, 40, 92, 170, 172, 176, and additionally or alternatively comprising one or more motifs having in increasing order of preference at least 50%, 55%, 60%, 65%, 70%, 75%, 80%, 85%, 90%, 95%, 96%, 97%, 98%, 99% or more sequence identity to any one or more of the motifs given in SEQ ID NO: 181 to SEQ ID NO: 186, and further preferably conferring enhanced yield-related traits relative to control plants;
[0080] (iii) derivatives of any of the amino acid sequences given in (i) or (ii) above.

[0081] The present invention is illustrated by transforming plants with the nucleic acid sequence represented by SEQ ID NO: 197, encoding the polypeptide sequence of SEQ ID NO: 198. However, performance of the invention is not restricted to these sequences; the methods of the invention may advantageously be performed using any nucleic acid encoding epimerase-related like polypeptides or any epimerase-related like polypeptide as defined herein.

[0082] Examples of nucleic acids encoding epimerase-related like polypeptides are given in Table A2 of the Examples section herein. Such nucleic acids are useful in performing the methods of the invention. The amino acid sequences given in Table A2 of the Examples section are example sequences of orthologues and paralogues of the epimerase-related like polypeptide represented by SEQ ID NO: 198, the terms “orthologues” and “paralogues” being as defined herein. Further orthologues and paralogues may readily be identified by performing a so-called reciprocal blast search as described in the definitions section; where the query sequence is SEQ ID NO: 197 or SEQ ID NO: 198, the second BLAST (back-BLAST) would be against poplar sequences.

[0083] The invention also provides hitherto unknown epimerase-related like-encoding nucleic acids and epimerase-related like polypeptides useful for conferring enhanced yield-related traits in plants relative to control plants.

[0084] According to a further embodiment of the present invention, there is therefore provided an isolated nucleic acid molecule selected from:
[0085] (i) a nucleic acid represented by SEQ ID NO: 199;
[0086] (ii) the complement of a nucleic acid represented by SEQ ID NO: 199;
[0087] (iii) a nucleic acid encoding epimerase-related like polypeptide having in increasing order of preference at least 50%, 51%, 52%, 53%, 54%, 55%, 56%, 57%, 58%, 59%, 60%, 61%, 62%, 63%, 64%, 65%, 66%, 67%, 68%, 69%, 70%, 71%, 72%, 73%, 74%, 75%, 76%, 77%, 78%, 79%, 80%, 81%, 82%, 83%, 84%, 85%, 86%, 87%, 88%, 89%, 90%, 91%, 92%, 93%, 94%, 95%, 96%, 97%, 98%, or 99% sequence identity to the amino acid sequence represented by SEQ ID NO: 200, and additionally or alternatively comprising one or more motifs having in increasing order of preference at least 50%, 55%, 60%, 65%, 70%, 75%, 80%, 85%, 90%, 95%, 96%, 97%, 98%, 99% or more sequence identity to any one or more of the motifs 7 to 13 as given herein, and further preferably conferring enhanced yield-related traits relative to control plants,
[0088] (iv) a nucleic acid molecule which hybridizes with a nucleic acid molecule of (i) to (iii) under high stringency hybridization conditions and preferably confers enhanced yield-related traits relative to control plants.

[0089] According to a further embodiment of the present invention, there is also provided an isolated polypeptide selected from:
[0090] (i) an amino acid sequence represented by SEQ ID NO: 200;
[0091] (ii) an amino acid sequence having, in increasing order of preference, at least 50%, 51%, 52%, 53%, 54%, 55%, 56%, 57%, 58%, 59%, 60%, 61%, 62%, 63%, 64%, 65%, 66%, 67%, 68%, 69%, 70%, 71%, 72%, 73%, 74%, 75%, 76%, 77%, 78%, 79%, 80%, 81%, 82%, 83%, 84%, 85%, 86%, 87%, 88%, 89%, 90%, 91%, 92%, 93%, 94%, 95%, 96%, 97%, 98%, or 99% sequence identity to the amino acid sequence represented by SEQ ID NO: 200, and additionally or alternatively comprising one or more motifs having in increasing order of preference at least 50%, 55%, 60%, 65%, 70%, 75%, 80%, 85%, 90%, 95%, 96%, 97%, 98%, 99% or more sequence identity to any one or more of the motifs 7 to 13 as given herein, and further preferably conferring enhanced yield-related traits relative to control plants;
[0092] (iii) derivatives of any of the amino acid sequences given in (i) or (ii) above.

[0093] The present invention is illustrated by transforming plants with the nucleic acid sequence represented by SEQ ID NO: 284, encoding the polypeptide sequence of SEQ ID NO: 285. However, performance of the invention is not restricted to these sequences; the methods of the invention may advantageously be performed using any PLPCase-encoding nucleic acid or PLPCase polypeptide as defined herein.

[0094] Examples of nucleic acids encoding PLPCase polypeptides are given in Table A3 of the Examples section herein. Such nucleic acids are useful in performing the methods of the invention. The amino acid sequences given in Table A3 of the Examples section are example sequences of orthologues and paralogues of the PLPCase polypeptide represented by SEQ ID NO: 285, the terms “orthologues” and “paralogues” being as defined herein. Further orthologues and paralogues may readily be identified by performing a so-called reciprocal blast search as described in the definitions section; where the query sequence is SEQ ID NO: 284 or SEQ ID NO: 285, the second BLAST (back-BLAST) would be against Medicago truncatula sequences.

[0095] The invention also provides hitherto unknown PLPCase-encoding nucleic acids and PLPCase polypeptides useful for conferring enhanced yield-related traits in plants relative to control plants.

[0096] According to a further embodiment of the present invention, there is therefore provided an isolated nucleic acid molecule selected from:
[0097] (i) a nucleic acid represented by any one of SEQ ID NO: 298, 302, 304, 312, 316, 336 or 346;
[0098] (ii) the complement of a nucleic acid represented by any one of SEQ ID NO: 298, 302, 304, 312, 316, 336 or 346;
[0099] (iii) a nucleic acid encoding a PLPCase polypeptide having in increasing order of preference at least 50%, 51%, 52%, 53%, 54%, 55%, 56%, 57%, 58%, 59%, 60%, 61%, 62%, 63%, 64%, 65%, 66%, 67%, 68%, 69%, 70%, 71%, 72%, 73%, 74%, 75%, 76%, 77%, 78%, 79%, 80%, 81%, 82%, 83%, 84%, 85%, 86%, 87%, 88%, 89%, 90%, 91%, 92%, 93%, 94%, 95%, 96%, 97%, 98%, or 99% sequence identity to the amino acid sequence represented by any one of SEQ ID NO: 299, 303, 305, 313, 317, 337 or 347, and additionally or alternatively comprising one or more motifs having in increasing order of preference at least 50%, 55%, 60%, 65%, 70%, 75%, 80%, 85%, 90%, 95%, 96%, 97%, 98%, 99% or more sequence identity to any one or more of the motifs given in SEQ ID NO: 348 to SEQ ID NO: 359, and further preferably conferring enhanced yield-related traits relative to control plants.
[0100] (iv) a nucleic acid molecule which hybridizes with a nucleic acid molecule of (i) to (iii) under high stringency hybridization conditions and preferably confers enhanced yield-related traits relative to control plants.

[0101] According to a further embodiment of the present invention, there is also provided an isolated polypeptide selected from:
[0102] (i) an amino acid sequence represented by any one of SEQ ID NO: 299, 303, 305, 313, 317, 337 or 347;
[0103] (ii) an amino acid sequence having, in increasing order of preference, at least 50%, 51%, 52%, 53%, 54%, 55%, 56%, 57%, 58%, 59%, 60%, 61%, 62%, 63%, 64%, 65%, 66%, 67%, 68%, 69%, 70%, 71%, 72%, 73%, 74%, 75%, 76%, 77%, 78%, 79%, 80%, 81%, 82%, 83%, 84%, 85%, 86%, 87%, 88%, 89%, 90%, 91%, 92%, 93%, 94%, 95%, 96%, 97%, 98%, or 99% sequence identity to the amino acid sequence represented by any one of SEQ ID NO: 299, 303, 305, 313, 317, 337 or 347, and additionally or alternatively comprising one or more motifs having in increasing order of preference at least 50%, 55%, 60%, 65%, 70%, 75%, 80%, 85%, 90%, 95%, 96%, 97%, 98%, 99% or more sequence identity to any one or more of the motifs given in SEQ ID NO: 348 to SEQ ID NO: 359, and further preferably conferring enhanced yield-related traits relative to control plants;
[0104] (iii) derivatives of any of the amino acid sequences given in (i) or (ii) above.

[0105] Nucleic acid variants may also be useful in practising the methods of the invention. Examples of such variants include nucleic acids encoding homologues and derivatives of any one of the amino acid sequences given in Table A1 to A3 of the Examples section, the terms “homologue” and “derivative” being as defined herein. Also useful in the methods of the invention are nucleic acids encoding homologues and derivatives of orthologues or paralogues of any one of the amino acid sequences given in Table A1 to A3 of the Examples section. Homologues and derivatives useful in the methods of the present invention have substantially the same biological and functional activity as the unmodified protein from which they are derived. Further variants useful in practising the methods of the invention are variants in which codon usage is optimised or in which miRNA target sites are removed.

[0106] Further nucleic acid variants useful in practising the methods of the invention include portions of nucleic acids encoding DUF642 polypeptides, or epimerase-related like polypeptides, or PLPCase polypeptides, nucleic acids hybridising to nucleic acids encoding POI polypeptides, splice variants of nucleic acids encoding DUF642 polypeptides, or epimerase-related like polypeptides, or PLPCase polypeptides, allelic variants of nucleic acids encoding DUF642 polypeptides, or epimerase-related like polypeptides, or PLPCase polypeptides and variants of nucleic acids encoding DUF642 polypeptides, or epimerase-related like polypeptides, or PLPCase polypeptides obtained by gene shuffling. The terms hybridising sequence, splice variant, allelic variant and gene shuffling are as described herein.

[0107] Nucleic acids encoding DUF642 polypeptides, or epimerase-related like polypeptides, or PLPCase polypeptides need not be full-length nucleic acids, since performance of the methods of the invention does not rely on the use of full-length nucleic acid sequences. According to the present invention, there is provided a method for enhancing yield-related traits in plants, comprising introducing and expressing in a plant a portion of any one of the nucleic acid sequences given in Table A1 to A3 of the Examples section, or a portion of a nucleic acid encoding an orthologue, paralogue or homologue of any of the amino acid sequences given in Table A1 to A3 of the Examples section.

[0108] A portion of a nucleic acid may be prepared, for example, by making one or more deletions to the nucleic acid. The portions may be used in isolated form or they may be fused to other coding (or non-coding) sequences in order to, for example, produce a protein that combines several activities. When fused to other coding sequences, the resultant polypeptide produced upon translation may be bigger than that predicted for the protein portion.

[0109] Concerning DUF642 polypeptides, portions useful in the methods of the invention, encode a DUF642 polypeptide as defined herein, and have substantially the same biological activity as the amino acid sequences given in Table A1 of the Examples section. Preferably, the portion is a portion of any one of the nucleic acids given in Table A1 of the Examples section, or is a portion of a nucleic acid encoding an orthologue or paralogue of any one of the amino acid sequences given in Table A1 of the Examples section. Preferably the portion is at least 250, 300, 350, 400, 450 consecutive nucleotides in length, the consecutive nucleotides being of any one of the nucleic acid sequences given in Table A1 of the Examples section, or of a nucleic acid encoding an orthologue or paralogue of any one of the amino acid sequences given in Table A1 of the Examples section. Most preferably the portion is a portion of the nucleic acid of SEQ ID NO: 1. Preferably, the portion encodes a fragment of an amino acid sequence which, when used in the construction of a phylogenetic tree, such as the one depicted in FIG. 5, clusters with the group of DUF642 polypeptides comprising the amino acid sequence represented by SEQ ID NO: 2 or 4 rather than with any other group, and/or comprises at least one of the motifs 1 to 6 (SEQ ID NO: 181 to 186), and/or has at least 50% sequence identity to SEQ ID NO: 2 or 4.

[0110] Concerning epimerase-related like polypeptides, portions useful in the methods of the invention, encode an epimerase-related like polypeptide as defined herein, and have substantially the same biological activity as the amino acid sequences given in Table A2 of the Examples section. Preferably, the portion is a portion of any one of the nucleic acids given in Table A2 of the Examples section, or is a portion of a nucleic acid encoding an orthologue or paralogue of any one of the amino acid sequences given in Table A2 of the Examples section. Preferably the portion is at least 850, 900, 950, 1000, 1050, 1100, 1150, 1200, 1250, 1300, 1350, 1400, 1450, 1500, 1550, consecutive nucleotides in length, the consecutive nucleotides being of any one of the nucleic acid sequences given in Table A2 of the Examples section, or of a nucleic acid encoding an orthologue or paralogue of any one of the amino acid sequences given in Table A2 of the Examples section. Most preferably the portion is a portion of the nucleic acid of SEQ ID NO: 197.

[0111] Preferably, the portion encodes a fragment of an amino acid sequence which has one or more of the following characteristics:
[0112] when used in the construction of a phylogenetic tree, such as the one depicted in FIG. 10, clusters with the group of polypeptides comprising the amino acid sequence represented by SEQ ID NO: 198 rather than with any other group;
[0113] comprises one or more of the following domains SSF53383, PTHR11601; PF00266, and G3DSA:3.40.640.10
[0114] comprises any one or more of the motifs 7 to 13 (as represented by SEQ ID NO 273, 274, 275, 280, 281, 282, 283, respectively) as provided herein, and
[0115] has at least 40% sequence identity to SEQ ID NO: 198.

[0116] Concerning PLPCase polypeptides, portions useful in the methods of the invention, encode a PLPCase polypeptide as defined herein, and have substantially the same biological activity as the amino acid sequences given in Table A3 of the Examples section. Preferably, the portion is a portion of any one of the nucleic acids given in Table A3 of the Examples section, or is a portion of a nucleic acid encoding an orthologue or paralogue of any one of the amino acid sequences given in Table A3 of the Examples section. Preferably the portion is at least 350, 400, 450, 500, 550, 600, 650, 700, 750, 780 consecutive nucleotides in length, the consecutive nucleotides being of any one of the nucleic acid sequences given in Table A3 of the Examples section, or of a nucleic acid encoding an orthologue or paralogue of any one of the amino acid sequences given in Table A3 of the Examples section. Most preferably the portion is a portion of the nucleic acid of SEQ ID NO: 284. Preferably, the portion encodes a fragment of an amino acid sequence which, when used in the construction of a phylogenetic tree, such as the one depicted in FIG. 14, clusters with the group of PLPCase polypeptides comprising the amino acid sequence represented by SEQ ID NO: 285 rather than with any other group, and/or comprises motifs any of the motifs 14 to 16, preferably any of the motifs 17 to 19, or preferably any of the motifs 20 to 22, more preferably comprises any of the motifs 23 to 25, and/or has phospholipase and/or carboxylesterase biological activity, and/or has at least 60% sequence identity to SEQ ID NO: 285.

[0117] Another nucleic acid variant useful in the methods of the invention is a nucleic acid capable of hybridising, under reduced stringency conditions, preferably under stringent conditions, with a nucleic acid encoding a DUF642 polypeptide, or an epimerase-related like polypeptide, or a PLPCase polypeptide as defined herein, or with a portion as defined herein.

[0118] According to the present invention, there is provided a method for enhancing yield-related traits in plants, comprising introducing and expressing in a plant a nucleic acid capable of hybridizing to the complement of a nucleic acid encoding any one of the proteins given in Table A of the Examples section, or to the complement of a nucleic acid encoding an orthologue, paralogue or homologue of any one of the proteins given in Table A of the Examples section.

[0119] Hybridising sequences useful in the methods of the invention encode a DUF642 polypeptide, or an epimerase-related like polypeptide, or a PLPCase polypeptide as defined herein, having substantially the same biological activity as the DUF642, epimerase-related like or PLPCase amino acid sequences given in Table A of the Examples section. Preferably, the hybridising sequence is capable of hybridising to the complement of a nucleic acid encoding any one of the proteins given in Table A of the Examples section, or to a portion of any of these sequences, a portion being as defined herein, or the hybridising sequence is capable of hybridising to the complement of a nucleic acid encoding an orthologue or paralogue of any one of the amino acid sequences given in Table A of the Examples section.

[0120] Concerning DUF642 polypeptides, the hybridising sequence is most preferably capable of hybridising to the complement of a nucleic acid encoding the polypeptide as represented by SEQ ID NO: 1 or to a portion thereof.

[0121] Preferably, the hybridising sequence encodes a polypeptide with an amino acid sequence which, when full-length and used in the construction of a phylogenetic tree, clusters with the group of DUF642 polypeptides comprising the amino acid sequence represented by SEQ ID NO: 2 and/or 4, rather than with any other group, comprises at least one of the motifs 1 to 6 (SEQ ID NO: 181 to 186), and/or has at least 50% sequence identity to SEQ ID NO: 2 or 4.

[0122] In one embodiment the hybridising sequence is capable of hybridising to the complement of a nucleic acid as represented by SEQ ID NO: 1 or SEQ ID NO: 3 or to a portion thereof under conditions of medium or high stringency, preferably high stringency as defined above. In another embodiment the hybridising sequence is capable of hybridising to the complement of a nucleic acid as represented by SEQ ID NO: 1 or SEQ ID NO: 3 under stringent conditions.

[0123] Concerning epimerase-related like polypeptides, the hybridising sequence is most preferably capable of hybridising to the complement of a nucleic acid encoding the polypeptide as represented by SEQ ID NO: 197 or to a portion thereof.

[0124] Preferably, the hybridising sequence encodes a polypeptide with an amino acid sequence which has one or more of the following characteristics:
[0125] when used in the construction of a phylogenetic tree, such as the one depicted in FIG. 10, clusters with the group of polypeptides comprising the amino acid sequence represented by SEQ ID NO: 198 rather than with any other group;
[0126] comprises one or more of the following domains SSF53383, PTHR11601; PF00266, and G3DSA:3.40.640.10
[0127] comprises any one or more of the motifs 7 to 13 (as represented by SEQ ID NO 273, 274, 275, 280, 281, 282, 283, respectively) as provided herein, and
[0128] has at least 40% sequence identity to SEQ ID NO: 198.

[0129] In one embodiment the hybridising sequence is capable of hybridising to the complement of a nucleic acid as represented by SEQ ID NO: 197 or to a portion thereof under conditions of medium or high stringency, preferably high stringency as defined above. In another embodiment the hybridising sequence is capable of hybridising to the complement of a nucleic acid as represented by SEQ ID NO: 197 under stringent conditions.

[0130] Concerning PLPCase polypeptides, the hybridising sequence is most preferably capable of hybridising to the complement of a nucleic acid encoding the polypeptide as represented by SEQ ID NO: 284 or to a portion thereof. In one embodiment, the hybridization conditions are of medium stringency, preferably of high stringency, as defined herein.

[0131] Preferably, the hybridising sequence encodes a polypeptide with an amino acid sequence which, when full-length and used in the construction of a phylogenetic tree, such as the one depicted in FIG. 14, clusters with the group of PLPCase polypeptides comprising the amino acid sequence represented by SEQ ID NO: 285 rather than with any other group, and/or comprises motifs any of the motifs 14 to 16, preferably any of the motifs 17 to 19, or preferably any of the motifs 20 to 22, more preferably comprises any of the motifs 23 to 25, and/or has phospholipase and/or carboxylesterase biological activity, and/or has at least 60% sequence identity to SEQ ID NO: 285.

[0132] Another nucleic acid variant useful in the methods of the invention is a splice variant encoding a DUF642 polypeptide, or an epimerase-related like polypeptide, or a PLPCase polypeptide as defined hereinabove, a splice variant being as defined herein.

[0133] According to the present invention, there is provided a method for enhancing yield-related traits in plants, comprising introducing and expressing in a plant a splice variant of any one of the nucleic acid sequences given in Table A of the Examples section, or a splice variant of a nucleic acid encoding an orthologue, paralogue or homologue of any of the amino acid sequences given in Table A of the Examples section.

[0134] Concerning DUF642 polypeptides, preferred splice variants are splice variants of a nucleic acid represented by SEQ ID NO: 1, or a splice variant of a nucleic acid encoding an orthologue or paralogue of SEQ ID NO: 2. Preferably, the amino acid sequence encoded by the splice variant, when used in the construction of a phylogenetic tree, clusters with the group of DUF642 polypeptides comprising the amino acid sequence represented by SEQ ID NO: 2 and/or 4, rather than with any other group, comprises at least one of the motifs 1 to 6 (SEQ ID NO: 181 to 186), and/or has at least 50% sequence identity to SEQ ID NO: 2 or 4.

[0135] Concerning epimerase-related like polypeptides, preferred splice variants are splice variants of a nucleic acid represented by SEQ ID NO: 197, or a splice variant of a nucleic acid encoding an orthologue or paralogue of SEQ ID NO: 198. Preferably, the amino acid sequence encoded by the splice variant, has one or more of the following characteristics:
[0136] when used in the construction of a phylogenetic tree, such as the one depicted in FIG. 10, clusters with the group of polypeptides comprising the amino acid sequence represented by SEQ ID NO: 198 rather than with any other group;
[0137] comprises one or more of the following domains SSF53383, PTHR11601; PF00266, and G3DSA:3.40.640.10
[0138] comprises any one or more of the motifs 7 to 13 (as represented by SEQ ID NO 273, 274, 275, 280, 281, 282, 283, respectively) as provided herein, and
[0139] has at least 40% sequence identity to SEQ ID NO: 198.

[0140] Concerning PLPCase polypeptides, preferred splice variants are splice variants of a nucleic acid represented by SEQ ID NO: 284, or a splice variant of a nucleic acid encoding an orthologue or paralogue of SEQ ID NO: 285. Preferably, the amino acid sequence encoded by the splice variant, when used in the construction of a phylogenetic tree, such as the one depicted in FIG. 14, clusters with the group of PLPCase polypeptides comprising the amino acid sequence represented by SEQ ID NO: 285 rather than with any other group, and/or comprises motifs any of the motifs 14 to 16, preferably any of the motifs 17 to 19, or preferably any of the motifs 20 to 22, more preferably comprises any of the motifs 23 to 25, and/or has phospholipase and/or carboxylesterase biological activity, and/or has at least 60% sequence identity to SEQ ID NO: 285.

[0141] Another nucleic acid variant useful in performing the methods of the invention is an allelic variant of a nucleic acid encoding a DUF642 polypeptide, or an epimerase-related like polypeptide, or a PLPCase polypeptide as defined herein, an allelic variant being as defined herein.

[0142] According to the present invention, there is provided a method for enhancing yield-related traits in plants, comprising introducing and expressing in a plant an allelic variant of any one of the nucleic acids given in Table A of the Examples section, or comprising introducing and expressing in a plant an allelic variant of a nucleic acid encoding an orthologue, paralogue or homologue of any of the amino acid sequences given in Table A of the Examples section.

[0143] Concerning DUF642 polypeptides, the polypeptides encoded by allelic variants useful in the methods of the present invention have substantially the same biological activity as the DUF642 polypeptide of SEQ ID NO: 2 and any of the amino acids depicted in Table A1 of the Examples section. Allelic variants exist in nature, and encompassed within the methods of the present invention is the use of these natural alleles. Preferably, the allelic variant is an allelic variant of SEQ ID NO: 1 or an allelic variant of a nucleic acid encoding an orthologue or paralogue of SEQ ID NO: 2. Preferably, the amino acid sequence encoded by the allelic variant, when used in the construction of a phylogenetic tree, clusters with the DUF642 polypeptides comprising the amino acid sequence represented by SEQ ID NO: 2 and/or 4, rather than with any other group, comprises at least one of the motifs 1 to 6 (SEQ ID NO: 181 to 186), and/or has at least 50% sequence identity to SEQ ID NO: 2 or 4.

[0144] Concerning epimerase-related like polypeptides, the polypeptides encoded by allelic variants useful in the methods of the present invention have substantially the same biological activity as the epimerase-related like polypeptide of SEQ ID NO: 198 and any of the amino acids depicted in Table A2 of the Examples section. Allelic variants exist in nature, and encompassed within the methods of the present invention is the use of these natural alleles. Preferably, the allelic variant is an allelic variant of SEQ ID NO: 197 or an allelic variant of a nucleic acid encoding an orthologue or paralogue of SEQ ID NO: 198. Preferably, the amino acid sequence encoded by the allelic variant has one or more of the following characteristics:
[0145] when used in the construction of a phylogenetic tree, such as the one depicted in FIG. 10, clusters with the group of polypeptides comprising the amino acid sequence represented by SEQ ID NO: 198 rather than with any other group;
[0146] comprises one or more of the following domains SSF53383, PTHR11601; PF00266, and G3DSA:3.40.640.10
[0147] comprises any one or more of the motifs 7 to 13 (as represented by SED ID NO 273, 274, 275, 280, 281, 282, 283, respectively) as provided herein, and
[0148] has at least 40% sequence identity to SEQ ID NO: 198.

[0149] Concerning PLPCase polypeptides, the polypeptides encoded by allelic variants useful in the methods of the present invention have substantially the same biological activity as the PLPCase polypeptide of SEQ ID NO: 285 and any of the amino acids depicted in Table A3 of the Examples section. Allelic variants exist in nature, and encompassed within the methods of the present invention is the use of these natural alleles. Preferably, the allelic variant is an allelic variant of SEQ ID NO: 284 or an allelic variant of a nucleic acid encoding an orthologue or paralogue of SEQ ID NO: 285. Preferably, the amino acid sequence encoded by the allelic variant, when used in the construction of a phylogenetic tree, such as the one depicted in FIG. 14, clusters with the PLPCase polypeptides comprising the amino acid sequence represented by SEQ ID NO: 285 rather than with any other group, and/or comprises motifs any of the motifs 14 to 16, preferably any of the motifs 17 to 19, or preferably any of the motifs 20 to 22, more preferably comprises any of the motifs 23 to 25, and/or has phospholipase and/or carboxylesterase biological activity, and/or has at least 60% sequence identity to SEQ ID NO: 285.

[0150] Gene shuffling or directed evolution may also be used to generate variants of nucleic acids encoding DUF642 polypeptides, or epimerase-related like polypeptides, or PLPCase polypeptides as defined herein; the term “gene shuffling” being as defined herein.

[0151] According to the present invention, there is provided a method for enhancing yield-related traits in plants, comprising introducing and expressing in a plant a variant of any one of the nucleic acid sequences given in Table A of the Examples section, or comprising introducing and expressing in a plant a variant of a nucleic acid encoding an orthologue, paralogue or homologue of any of the amino acid sequences given in Table A of the Examples section, which variant nucleic acid is obtained by gene shuffling.

[0152] Concerning DUF642 polypeptides, the amino acid sequence encoded by the variant nucleic acid obtained by gene shuffling, when used in the construction of a phylogenetic tree, preferably clusters with the group of DUF642 polypeptides comprising the amino acid sequence represented by SEQ ID NO: 2 and/or 4, rather than with any other group, comprises at least one of the motifs 1 to 6 (SEQ ID NO: 181 to 186), and/or has at least 50% sequence identity to SEQ ID NO: 2 or 4.

[0153] Concerning epimerase-related like polypeptides, the amino acid sequence encoded by the variant nucleic acid obtained by gene shuffling, preferably is an amino acid sequence which has one or more of the following characteristics:
[0154] when used in the construction of a phylogenetic tree, such as the one depicted in FIG. 10, clusters with the group of polypeptides comprising the amino acid sequence represented by SEQ ID NO: 198 rather than with any other group;
[0155] comprises one or more of the following domains SSF53383, PTHR11601; PF00266, and G3DSA:3.40.640.10
[0156] comprises any one or more of the motifs 7 to 13 (as represented by SEQ ID NO 273, 274, 275, 280, 281, 282, 283, respectively) as provided herein, and
[0157] has at least 40% sequence identity to SEQ ID NO: 198.

[0158] Concerning PLPCase polypeptides, the amino acid sequence encoded by the variant nucleic acid obtained by gene shuffling, when used in the construction of a phylogenetic tree such as the one depicted in FIG. 14, preferably clusters with the group of PLPCase polypeptides comprising the amino acid sequence represented by SEQ ID NO: 285 rather than with any other group, and/or comprises motifs any of the motifs 14 to 16, preferably any of the motifs 17 to 19, or preferably any of the motifs 20 to 22, more preferably comprises any of the motifs 23 to 25, and/or has phospholipase and/or carboxylesterase biological activity, and/or has at least 60% sequence identity to SEQ ID NO: 285.

[0159] Furthermore, nucleic acid variants may also be obtained by site-directed mutagenesis. Several methods are available to achieve site-directed mutagenesis, the most common being PCR based methods (Current Protocols in Molecular Biology. Wiley Eds.).

[0160] Concerning DUF642 polypeptides, nucleic acids encoding DUF642 polypeptides may be derived from any natural or artificial source. The nucleic acid may be modified from its native form in composition and/or genomic environment through deliberate human manipulation. Preferably the DUF642 polypeptide-encoding nucleic acid is from a plant, further preferably from a monocotyledonous plant, more preferably from the family Poaceae, most preferably the nucleic acid is from Oryza sativa.

[0161] For example, the nucleic acid encoding the DUF642 polypeptide of SEQ ID NO:2 can be generated from the nucleic acid encoding the DUF642 polypeptide of SEQ ID NO:2 by alteration of several nucleotides, e.g. by site-directed mutagenesis using PCR based methods (see Current Protocols in Molecular Biology, John Wiley & Sons, N.Y. (1989 and yearly updates)). DUF642 polypeptides differing from the sequence of SEQ ID NO: 2 or SEQ ID NO: 4 by one or several amino acids may be used to increase the yield of plants in the methods and constructs and plants of the invention.

[0162] Concerning epimerase-related like polypeptides, nucleic acids encoding epimerase-related like polypeptides may be derived from any natural or artificial source. The nucleic acid may be modified from its native form in composition and/or genomic environment through deliberate human manipulation. Preferably the epimerase-related like polypeptide-encoding nucleic acid is from a plant, further preferably from a dicotyledonous plant, further preferably from the family Salicaceae, more preferably the nucleic acid is from the genus Populus, and most preferably the nucleic acid is from Populus trichocarpa.

[0163] Concerning PLPCase polypeptides, nucleic acids encoding PLPCase polypeptides may be derived from any natural or artificial source. The nucleic acid may be modified from its native form in composition and/or genomic environment through deliberate human manipulation. Preferably the PLPCase polypeptide-encoding nucleic acid is from a plant, further preferably from a dicotyledonous plant, more preferably from the family Fabaceae, more preferably from the genus Medicago, most preferably the nucleic acid is from Medicago truncatula.

[0164] PLPCase polypeptides differing from the sequence of SEQ ID NO: 285 by one or several amino acids (substitution(s), insertion(s) and/or deletion(s) as defined above) may equally be useful to increase the yield of plants in the methods and constructs and plants of the invention.

[0165] In another embodiment the present invention extends to recombinant chromosomal DNA comprising a nucleic acid sequence useful in the methods of the invention, wherein said nucleic acid is present in the chromosomal DNA as a result of recombinant methods, i.e. said nucleic acid is not in the chromosomal DNA in its native surrounding. Said recombinant chromosomal DNA may be a chromosome of native origin, with said nucleic acid inserted by recombinant means, or it may be a mini-chromosome or a non-native chromosomal structure, e.g. or an artificial chromosome. The nature of the chromosomal DNA may vary, as long as it allows for stable passing on to successive generations of the recombinant nucleic acid useful in the methods of the invention, and allows for expression of said nucleic acid in a living plant cell resulting in increased yield or increased yield related traits of the plant cell or a plant comprising the plant cell. In a further embodiment the recombinant chromosomal DNA of the invention is comprised in a plant cell.

[0166] Performance of the methods of the invention gives plants having enhanced yield-related traits. In particular performance of the methods of the invention gives plants having increased yield, especially increased seed yield relative to control plants. The terms “yield” and “seed yield” are described in more detail in the “definitions” section herein.

[0167] Reference herein to enhanced yield-related traits is taken to mean an increase of early vigour and/or in biomass (weight) of one or more parts of a plant, which may include (i) aboveground parts and preferably aboveground harvestable parts and/or (ii) parts below ground and preferably harvestable below ground. In particular, such harvestable parts are seeds, and performance of the methods of the invention results in plants having increased seed yield relative to the seed yield of control plants.

[0168] The present invention provides a method for increasing yield, especially seed yield of plants, relative to control plants, which method comprises modulating expression in a plant of a nucleic acid encoding a DUF642 polypeptide as defined herein.

[0169] The present invention also provides a method for increasing yield, and more particularly increased seed yield and/or increased biomass, relative to control plants, which method comprises modulating expression in a plant of a nucleic acid encoding an epimerase-related like polypeptide as defined herein.

[0170] The present invention also provides a method for increasing yield, especially enhancing root biomass of plants, relative to control plants, which method comprises modulating expression in a plant of a nucleic acid encoding a PLPCase polypeptide as defined herein.

[0171] According to a preferred feature of the present invention, performance of the methods of the invention gives plants having an increased growth rate relative to control plants. Therefore, according to the present invention, there is provided a method for increasing the growth rate of plants, which method comprises modulating expression in a plant of a nucleic acid encoding a DUF642 polypeptide, or an epimerase-related like polypeptide, or a PLPCase polypeptide as defined herein.

[0172] Performance of the methods of the invention gives plants grown under non-stress conditions or under mild drought conditions increased yield relative to control plants grown under comparable conditions. Therefore, according to the present invention, there is provided a method for increasing yield in plants grown under non-stress conditions or under mild drought conditions, which method comprises modulating expression in a plant of a nucleic acid encoding a DUF642 polypeptide, or an epimerase-related like polypeptide, or a PLPCase polypeptide.

[0173] Performance of the methods of the invention gives plants grown under conditions of drought, increased yield relative to control plants grown under comparable conditions. Therefore, according to the present invention, there is provided a method for increasing yield in plants grown under conditions of drought which method comprises modulating expression in a plant of a nucleic acid encoding a DUF642 polypeptide, or an epimerase-related like polypeptide, or a PLPCase polypeptide.

[0174] Performance of the methods of the invention gives plants grown under conditions of nutrient deficiency, particularly under conditions of nitrogen deficiency, increased yield relative to control plants grown under comparable conditions. Therefore, according to the present invention, there is provided a method for increasing yield-related traits in plants grown under conditions of nutrient deficiency, which method comprises modulating expression in a plant of a nucleic acid encoding a DUF642 polypeptide, or an epimerase-related like polypeptide, or a PLPCase polypeptide.

[0175] Performance of the methods of the invention gives plants grown under conditions of salt stress, increased yield relative to control plants grown under comparable conditions. Therefore, according to the present invention, there is provided a method for increasing yield in plants grown under conditions of salt stress, which method comprises modulating expression in a plant of a nucleic acid encoding a DUF642 polypeptide, or an epimerase-related like polypeptide, or a PLPCase polypeptide.

[0176] The invention also provides genetic constructs and vectors to facilitate introduction and/or expression in plants of nucleic acids encoding DUF642 polypeptides, or epimerase-related like polypeptides, or PLPCase polypeptides. The gene constructs may be inserted into vectors, which may be commercially available, suitable for transforming into plants or host cells and suitable for expression of the gene of interest in the transformed cells. The invention also provides use of a gene construct as defined herein in the methods of the invention.

[0177] More specifically, the present invention provides a construct comprising:
[0178] (a) a nucleic acid encoding a DUF642 polypeptide, or an epimerase-related like polypeptide, or a PLPCase polypeptide as defined herein;
[0179] (b) one or more control sequences capable of driving expression of the nucleic acid sequence of (a); and optionally
[0180] (c) a transcription termination sequence.

[0181] Preferably, the nucleic acid encoding a DUF642 polypeptide, or an epimerase-related like polypeptide, or a PLPCase polypeptide is as defined herein. The term “control sequence” and “termination sequence” are as defined herein.

[0182] In a preferred embodiment, the present invention provides a construct comprising:
[0183] (a) a nucleic acid encoding a PLPCase polypeptide as represented by any of SEQ ID NO: 299, 303, 305, 313, 317, 337 or 347;
[0184] (b) one or more control sequences capable of driving expression of the nucleic acid sequence of (a); and optionally
[0185] (c) a transcription termination sequence.

[0186] The genetic construct of the invention may be comprised in a host cell, plant cell, seed, agricultural product or plant. Plants or host cells are transformed with a genetic construct such as a vector or an expression cassette comprising any of the nucleic acids described herein. Thus the invention furthermore provides plants or host cells transformed with a construct as described above. In particular, the invention provides plants transformed with a construct as described above, which plants have increased yield-related traits as described herein.

[0187] In one embodiment the genetic construct of the invention confers increased yield or yield related traits(s) to a living plant cell when it has been introduced into said plant cell and express the nucleic acid encoding the DUF642 polypeptide, or the epimerase-related like polypeptide, or the PLPCase polypeptide, comprised in the genetic construct.

[0188] The skilled artisan is well aware of the genetic elements that must be present on the genetic construct in order to successfully transform, select and propagate host cells containing the sequence of interest. The sequence of interest is operably linked to one or more control sequences (at least to a promoter).

[0189] The promoter in such a genetic construct may be a non-native promoter to the nucleic acid described above, i.e. a promoter which does not regulate the expression of the herein disclosed polynucleotides in its native surrounding.

[0190] Advantageously, any type of promoter, whether natural or synthetic, may be used to drive expression of the nucleic acid sequence, but preferably the promoter is of plant origin. A constitutive promoter is particularly useful in the methods. Preferably the constitutive promoter is a ubiquitous constitutive promoter of medium strength. See the “Definitions” section herein for definitions of the various promoter types.

[0191] The constitutive promoter is preferably a ubiquitous constitutive promoter of medium strength. More preferably it is a plant derived promoter, e.g. a promoter of plant chromosomal origin, such as a GOS2 promoter or a promoter of substantially the same strength and having substantially the same expression pattern (a functionally equivalent promoter), more preferably the promoter is the promoter GOS2 promoter from rice. Further preferably the constitutive promoter is represented by a nucleic acid sequence substantially similar to SEQ ID NO: 189, or SEQ ID NO: 278, or SEQ ID NO: 361, most preferably the constitutive promoter is as represented by SEQ ID NO: 189, or SEQ ID NO: 278, or SEQ ID NO: 361. See the “Definitions” section herein for further examples of constitutive promoters.

[0192] Concerning DUF642 polypeptides, it should be clear that the applicability of the present invention is not restricted to the DUF642 polypeptide-encoding nucleic acid represented by SEQ ID NO: 1 or 3, nor is the applicability of the invention restricted to expression of a DUF642 polypeptide-encoding nucleic acid when driven by a constitutive promoter.

[0193] Concerning epimerase-related like polypeptides, it should be clear that the applicability of the present invention is not restricted to the epimerase-related like polypeptide-encoding nucleic acid represented by SEQ ID NO: 197, nor is the applicability of the invention restricted to expression of an epimerase-related like polypeptide-encoding nucleic acid when driven by a constitutive promoter, or when driven by a root-specific promoter.

[0194] Concerning PLPCase polypeptides, it should be clear that the applicability of the present invention is not restricted to the PLPCase polypeptide-encoding nucleic acid represented by SEQ ID NO: 284, nor is the applicability of the invention restricted to expression of a PLPCase polypeptide-encoding nucleic acid when driven by a constitutive promoter.

[0195] Concerning DUF642 polypeptides, optionally, one or more terminator sequences may be used in the construct introduced into a plant. Preferably, the construct comprises an expression cassette comprising a GOS2 promoter, substantially similar to SEQ ID NO: 189, operably linked to the nucleic acid encoding the DUF642 polypeptide. More preferably, the construct comprises a zein terminator (t-zein) linked to the 3′ end of the DUF642 coding sequence. Most preferably, the expression cassette comprises a sequence having in increasing order of preference at least 95%, at least 96%, at least 97%, at least 98%, at least 99% identity to the sequence represented by SEQ ID NO: 187 or 188 (pPRO::DUF642::t-zein sequence). Furthermore, one or more sequences encoding selectable markers may be present on the construct introduced into a plant.

[0196] Concerning epimerase-related like polypeptides, optionally, one or more terminator sequences may be used in the construct introduced into a plant. Preferably, the construct comprises an expression cassette comprising a GOS2 promoter, substantially similar to SEQ ID NO: 278, operably linked to the nucleic acid encoding the epimerase-related like polypeptide. More preferably, the construct comprises a zein terminator (t-zein) linked to the 3′ end of the coding sequence of an epimerase-related like polypeptide. Most preferably, the expression cassette comprises a sequence having in increasing order of preference at least 95%, at least 96%, at least 97%, at least 98%, at least 99% identity to the sequence represented by SEQ ID NO: 279 (pPRO::ERL::t-zein sequence). Furthermore, one or more sequences encoding selectable markers may be present on the construct introduced into a plant.

[0197] Concerning PLPCase polypeptides, optionally, one or more terminator sequences may be used in the construct introduced into a plant. Preferably, the construct comprises an expression cassette comprising a GOS2 promoter, substantially similar to SEQ ID NO: 361, operably linked to the nucleic acid encoding the PLPCase polypeptide. More preferably, the expression cassette comprises the sequence represented by SEQ ID NO: 360 (pGOS2::PLPCase::t-zein sequence). Furthermore, one or more sequences encoding selectable markers may be present on the construct introduced into a plant.

[0198] According to a preferred feature of the invention, the modulated expression is increased expression. Methods for increasing expression of nucleic acids or genes, or gene products, are well documented in the art and examples are provided in the definitions section.

[0199] As mentioned above, a preferred method for modulating expression of a nucleic acid encoding a DUF642 polypeptide, or a epimerase-related like polypeptide, or a PLPCase polypeptide is by introducing and expressing in a plant a nucleic acid encoding a DUF642 polypeptide, or a epimerase-related like polypeptide, or a PLPCase polypeptide; however the effects of performing the method, i.e. enhancing yield-related traits may also be achieved using other well known techniques, including but not limited to T-DNA activation tagging, TILLING, homologous recombination. A description of these techniques is provided in the definitions section.

[0200] The invention also provides a method for the production of transgenic plants having enhanced yield-related traits relative to control plants, comprising introduction and expression in a plant of any nucleic acid encoding a DUF642 polypeptide, or a epimerase-related like polypeptide, or a PLPCase polypeptide as defined herein.

[0201] More specifically, the present invention provides a method for the production of transgenic plants having enhanced yield-related traits, particularly increased yield, more particularly increased seed yield, which method comprises:
[0202] (i) introducing and expressing in a plant or plant cell a DUF642 polypeptide-encoding nucleic acid or a genetic construct comprising a DUF642 polypeptide-encoding nucleic acid; and
[0203] (ii) cultivating the plant cell under conditions promoting plant growth and development.

[0204] The nucleic acid of (i) may be any of the nucleic acids capable of encoding a DUF642 polypeptide as defined herein.

[0205] More specifically, the present invention also provides a method for the production of transgenic plants having enhanced yield-related traits, particularly increased yield, and more particularly increased seed yield and/or increased biomass, which method comprises:
[0206] (i) introducing and expressing in a plant or plant cell an epimerase-related like polypeptide-encoding nucleic acid or a genetic construct comprising an epimerase-related like polypeptide-encoding nucleic acid; and
[0207] (ii) cultivating the plant cell under conditions promoting plant growth and development.

[0208] The nucleic acid of (i) may be any of the nucleic acids capable of encoding an epimerase-related like polypeptide as defined herein.

[0209] More specifically, the present invention also provides a method for the production of transgenic plants having enhanced yield-related traits, particularly increased root biomass, which method comprises:
[0210] (i) introducing and expressing in a plant or plant cell a PLPCase polypeptide-encoding nucleic acid or a genetic construct comprising a PLPCase polypeptide-encoding nucleic acid; and
[0211] (ii) cultivating the plant cell under conditions promoting plant growth and development.

[0212] The nucleic acid of (i) may be any of the nucleic acids capable of encoding a PLPCase polypeptide as defined herein.

[0213] Cultivating the plant cell under conditions promoting plant growth and development, may or may not include regeneration and/or growth to maturity. Accordingly, in a particular embodiment of the invention, the plant cell transformed by the method according to the invention is regenerable into a transformed plant. In another particular embodiment, the plant cell transformed by the method according to the invention is not regenerable into a transformed plant, i.e. cells that are not capable to regenerate into a plant using cell culture techniques known in the art. While plants cells generally have the characteristic of totipotency, some plant cells can not be used to regenerate or propagate intact plants from said cells. In one embodiment of the invention the plant cells of the invention are such cells. In another embodiment the plant cells of the invention are plant cells that do not sustain themselves in an autotrophic way.

[0214] The nucleic acid may be introduced directly into a plant cell or into the plant itself (including introduction into a tissue, organ or any other part of a plant). According to a preferred feature of the present invention, the nucleic acid is preferably introduced into a plant or plant cell by transformation. The term “transformation” is described in more detail in the “definitions” section herein.

[0215] In one embodiment the present invention extends to any plant cell or plant produced by any of the methods described herein, and to all plant parts and propagules thereof.

[0216] The present invention encompasses plants or parts thereof (including seeds) obtainable by the methods according to the present invention. The plants or plant parts or plant cells comprise a nucleic acid transgene encoding a DUF642 polypeptide, or a epimerase-related like polypeptide, or a PLPCase polypeptide as defined herein, preferably in a genetic construct such as an expression cassette. The present invention extends further to encompass the progeny of a primary transformed or transfected cell, tissue, organ or whole plant that has been produced by any of the aforementioned methods, the only requirement being that progeny exhibit the same genotypic and/or phenotypic characteristic(s) as those produced by the parent in the methods according to the invention.

[0217] In a further embodiment the invention extends to seeds comprising the expression cassettes of the invention, the genetic constructs of the invention, or the nucleic acids encoding the DUF642 polypeptides, or the epimerase-related like polypeptides, or the PLPCase polypeptides and/or the DUF642 polypeptides, or the epimerase-related like polypeptides, or the PLPCase polypeptides as described above.

[0218] The invention also includes host cells containing an isolated nucleic acid encoding a DUF642 polypeptide, or a epimerase-related like polypeptide, or a PLPCase polypeptide as defined herein. In one embodiment host cells according to the invention are plant cells, yeasts, bacteria or fungi. Host plants for the nucleic acids, construct, expression cassette or the vector used in the method according to the invention are, in principle, advantageously all plants which are capable of synthesizing the polypeptides used in the inventive method. In a particular embodiment the plant cells of the invention overexpress the nucleic acid molecule of the invention.

[0219] The methods of the invention are advantageously applicable to any plant, in particular to any plant as defined herein. Plants that are particularly useful in the methods of the invention include all plants which belong to the superfamily Viridiplantae, in particular monocotyledonous and dicotyledonous plants including fodder or forage legumes, ornamental plants, food crops, trees or shrubs. According to an embodiment of the present invention, the plant is a crop plant. Examples of crop plants include but are not limited to chicory, carrot, cassava, trefoil, soybean, beet, sugar beet, sunflower, canola, alfalfa, rapeseed, linseed, cotton, tomato, potato and tobacco. According to another embodiment of the present invention, the plant is a monocotyledonous plant. Examples of monocotyledonous plants include sugarcane. According to another embodiment of the present invention, the plant is a cereal. Examples of cereals include rice, maize, wheat, barley, millet, rye, triticale, sorghum, emmer, spelt, einkorn, teff, milo and oats. In a particular embodiment the plants used in the methods of the invention are selected from the group consisting of maize, wheat, rice, soybean, cotton, oilseed rape including canola, sugarcane, sugar beet and alfalfa. Advantageously the methods of the invention are more efficient than the known methods, because the plants of the invention have increased yield and/or tolerance to an environmental stress compared to control plants used in comparable methods. In another embodiment of the present invention the plants of the invention and the plants used in the methods of the invention are sugarcane plants with increased biomass and/or increased sugar content of the shoot. In yet another embodiment of the present invention the plants of the invention and the plants used in the methods of the invention are sugarbeet plants with increased biomass and/or increased sugar content of the beets.

[0220] The invention also extends to harvestable parts of a plant such as, but not limited to seeds, leaves, fruits, flowers, stems, roots, rhizomes, tubers and bulbs, which harvestable parts comprise a recombinant nucleic acid encoding a DUF642 polypeptide, or a epimerase-related like polypeptide, or a PLPCase polypeptide. The invention furthermore relates to products derived or produced, preferably directly derived or produced, from a harvestable part of such a plant, such as dry pellets, meal or powders, oil, fat and fatty acids, starch or proteins.

[0221] The invention also includes methods for manufacturing a product comprising a) growing the plants of the invention and b) producing said product from or by the plants of the invention or parts thereof, including seeds. In a further embodiment the methods comprise the steps of a) growing the plants of the invention, b) removing the harvestable parts as described herein from the plants and c) producing said product from, or with the harvestable parts of plants according to the invention.

[0222] Examples of such methods would be growing corn plants of the invention, harvesting the corn cobs and remove the kernels. These may be used as feedstuff or processed to starch and oil as agricultural products. The product may be produced at the site where the plant has been grown, or the plants or parts thereof may be removed from the site where the plants have been grown to produce the product. Typically, the plant is grown, the desired harvestable parts are removed from the plant, if feasible in repeated cycles, and the product made from the harvestable parts of the plant. The step of growing the plant may be performed only once each time the methods of the invention is performed, while allowing repeated times the steps of product production e.g. by repeated removal of harvestable parts of the plants of the invention and if necessary further processing of these parts to arrive at the product. It is also possible that the step of growing the plants of the invention is repeated and plants or harvestable parts are stored until the production of the product is then performed once for the accumulated plants or plant parts. Also, the steps of growing the plants and producing the product may be performed with an overlap in time, even simultaneously to a large extent, or sequentially. Generally the plants are grown for some time before the product is produced.

[0223] In one embodiment the products produced by the methods of the invention are plant products such as, but not limited to, a foodstuff, feedstuff, a food supplement, feed supplement, fiber, cosmetic or pharmaceutical. In another embodiment the methods for production are used to make agricultural products such as, but not limited to, plant extracts, proteins, amino acids, carbohydrates, fats, oils, polymers, vitamins, and the like.

[0224] In yet another embodiment the polynucleotides or the polypeptides of the invention are comprised in an agricultural product. In a particular embodiment the nucleic acid sequences and protein sequences of the invention may be used as product markers, for example where an agricultural product was produced by the methods of the invention. Such a marker can be used to identify a product to have been produced by an advantageous process resulting not only in a greater efficiency of the process but also improved quality of the product due to increased quality of the plant material and harvestable parts used in the process. Such markers can be detected by a variety of methods known in the art, for example but not limited to PCR based methods for nucleic acid detection or antibody based methods for protein detection.

[0225] The present invention also encompasses use of nucleic acids encoding DUF642 polypeptides, epimerase-related like polypeptides, or PLPCase polypeptides polypeptides as described herein and use of these DUF642 polypeptides, or epimerase-related like polypeptides, or PLPCase polypeptides in enhancing any of the aforementioned yield-related traits in plants. For example, nucleic acids encoding DUF642 polypeptides, or epimerase-related like polypeptides, or PLPCase polypeptides described herein, or the DUF642 polypeptides, or the epimerase-related like polypeptides, or the PLPCase polypeptides themselves, may find use in breeding programmes in which a DNA marker is identified which may be genetically linked to a DUF642 polypeptide-encoding gene, or an epimerase-related like polypeptide-encoding gene, or a PLPCase polypeptide-encoding gene. The nucleic acids/genes, or the DUF642 polypeptides, or the epimerase-related like polypeptides, or the PLPCase polypeptides themselves may be used to define a molecular marker. This DNA or protein marker may then be used in breeding programmes to select plants having enhanced yield-related traits as defined herein in the methods of the invention. Furthermore, allelic variants of a DUF642 polypeptide-encoding nucleic acid/gene, or an epimerase-related like polypeptide-encoding nucleic acid/gene, or a PLPCase polypeptide-encoding nucleic acid/gene may find use in marker-assisted breeding programmes. Nucleic acids encoding DUF642 polypeptides, or epimerase-related like polypeptides, or PLPCase polypeptides may also be used as probes for genetically and physically mapping the genes that they are a part of, and as markers for traits linked to those genes. Such information may be useful in plant breeding in order to develop lines with desired phenotypes.

[0226] Concerning DUF642 polypeptides, in one embodiment any comparison to determine sequence identity percentages is performed
[0227] in the case of a comparison of nucleic acids over the entire coding region of SEQ ID NO: 1 or SEQ ID NO: 3, or
[0228] in the case of a comparison of polypeptide sequences over the entire length of SEQ ID NO: 2 or SEQ ID NO: 4.

[0229] For example, a sequence identity of 50% sequence identity in this embodiment means that over the entire coding region of SEQ ID NO: 1, 50 percent of all bases are identical between the sequence of SEQ ID NO: 1 and the related sequence. Similarly, in this embodiment a polypeptide sequence is 50% identical to the polypeptide sequence of SEQ ID NO: 2, when 50 percent of the amino acids residues of the sequence as represented in SEQ ID NO: 2, are found in the polypeptide tested when comparing from the starting methionine to the end of the sequence of SEQ ID NO: 2.

[0230] Concerning epimerase-related like polypeptides, in one embodiment any comparison to determine sequence identity percentages is performed
[0231] in the case of a comparison of nucleic acids over the entire coding region of SEQ ID NO: 197, or
[0232] in the case of a comparison of polypeptide sequences over the entire length of SEQ ID NO: 198.

[0233] For example, a sequence identity of 50% sequence identity in this embodiment means that over the entire coding region of SEQ ID NO: 197, 50 percent of all bases are identical between the sequence of SEQ ID NO: 197 and the related sequence. Similarly, in this embodiment a polypeptide sequence is 50% identical to the polypeptide sequence of SEQ ID NO: 198, when 50 percent of the amino acids residues of the sequence as represented in SEQ ID NO: 198, are found in the polypeptide tested when comparing from the starting methionine to the end of the sequence of SEQ ID NO: 198.

[0234] Moreover concerning DUF642 polypeptides, the present invention relates to the following specific embodiments:
[0235] 1. A method for enhancing yield-related traits in plants relative to control plants, comprising modulating expression in a plant of a nucleic acid encoding a DUF642 polypeptide, wherein said DUF642 polypeptide comprises an InterPro accession IPR006946 DUF642 domain, preferably said DUF642 polypeptide comprises the signature sequence FSAARTCAQ (SEQ ID NO: 194).
[0236] 2. Method according to embodiment 1, wherein said modulated expression is effected by introducing and expressing in a plant said nucleic acid encoding said DUF642 polypeptide.
[0237] 3. Method according to embodiment 1 or 2, wherein said enhanced yield-related traits comprise increased yield relative to control plants, and preferably comprise increased biomass and/or increased seed yield relative to control plants.
[0238] 4. Method according to any one of embodiments 1 to 3, wherein said enhanced yield-related traits are obtained under non-stress conditions.
[0239] 5. Method according to any of embodiments 1 to 4, wherein said DUF642 polypeptide comprises one or more of the following motifs:

(i) Motif 1:
(SEQ ID NO: 181)
N[LAM][VL]KNG[DG]FEEGP[WYH][MI][FLI]P[NG][TS][STR]
[WL]GVL[LVI]P[PTS][NKM][LQDV][EDV][DE][ED][THY]S
[PS]L[PS][GP]W[IMT][IV],
(ii) Motif 2:
(SEQ ID NO: 182)
[VLA][EKAT][KPR]G[SAM][LRH]Y[SA][LIV][TI]F[SG]A
[AS]RTCAQ[DLAS]E[SVRL]L[NR][VI],
(iii) Motif 3:
(SEQ ID NO: 183)
D[PE][AT]CGP[LI][IL]D[AS][VIF]AI[KR]

[0240] 6. Method according to any one of embodiments 1 to 5, wherein said nucleic acid encoding a DUF642 is of plant origin, preferably from a monocotyledonous plant, further preferably from the family Poaceae, more preferably from the genus Oryza, most preferably from Oryza sativa.
[0241] 7. Method according to any one of embodiments 1 to 6, wherein said nucleic acid encoding a DUF642 encodes any one of the polypeptides listed in Table A1 or is a portion of such a nucleic acid, or a nucleic acid capable of hybridising with such a nucleic acid.
[0242] 8. Method according to any one of embodiments 1 to 7, wherein said nucleic acid sequence encodes an orthologue or paralogue of any of the polypeptides given in Table A1.
[0243] 9. Method according to any one of embodiments 1 to 8, wherein said nucleic acid encodes the polypeptide represented by SEQ ID NO: 2 or SEQ ID NO: 4 or a nucleic acid encoding a polypeptide having at least 90% sequence identity to SEQ ID NO: 2 and/or SEQ ID NO: 4.
[0244] 10. Method according to any one of embodiments 1 to 9 wherein said nucleic acid is operably linked to a constitutive promoter, preferably to a medium strength constitutive promoter, preferably to a plant promoter, more preferably to a GOS2 promoter, most preferably to a GOS2 promoter from rice.
[0245] 11. Plant, plant part thereof, including seeds, or plant cell, obtainable by a method according to any one of embodiments 1 to 10, wherein said plant, plant part or plant cell comprises a recombinant nucleic acid encoding a DUF642 polypeptide as defined in any of embodiments 1 and 5 to 9.
[0246] 12. Construct comprising:
   [0247] (i) nucleic acid encoding a DUF642 as defined in any of embodiments 1 and 5 to 9;
   [0248] (ii) one or more control sequences capable of driving expression of the nucleic acid sequence of (i); and optionally
   [0249] (iii) a transcription termination sequence.
[0250] 13. Construct according to embodiment 12, wherein one of said control sequences is a constitutive promoter, preferably a medium strength constitutive promoter, preferably to a plant promoter, more preferably a GOS2 promoter, most preferably a GOS2 promoter from rice.
[0251] 14. Use of a construct according to embodiment 12 or 13 in a method for making plants having enhanced yield-related traits, preferably increased yield relative to control plants, and more preferably increased seed yield and/or increased biomass relative to control plants.
[0252] 15. Plant, plant part or plant cell transformed with a construct according to embodiment 12 or 13.
[0253] 16. Method for the production of a transgenic plant having enhanced yield-related traits relative to control plants, preferably increased yield relative to control plants, and more preferably increased seed yield and/or increased biomass relative to control plants, comprising:
   [0254] (i) introducing and expressing in a plant cell or plant a nucleic acid encoding a DUF642 polypeptide as defined in any of embodiments 1 and 5 to 9; and
   [0255] (ii) cultivating said plant cell or plant under conditions promoting plant growth and development.
[0256] 17. Transgenic plant having enhanced yield-related traits relative to control plants, preferably increased yield relative to control plants, and more preferably increased seed yield and/or increased biomass, resulting from modulated expression of a nucleic acid encoding a DUF642 polypeptide as defined in any of embodiments 1 and 5 to 9 or a transgenic plant cell derived from said transgenic plant.
[0257] 18. Transgenic plant according to embodiment 11, 15 or 17, or a transgenic plant cell derived therefrom, wherein said plant is a crop plant, such as beet, sugarbeet or alfalfa; or a monocotyledonous plant such as sugarcane; or a cereal, such as rice, maize, wheat, barley, millet, rye, triticale, sorghum, emmer, spelt, einkorn, teff, milo or oats.
[0258] 19. Harvestable parts of a plant according to embodiment 18, wherein said harvestable parts are preferably shoot biomass and/or seeds.
[0259] 20. Products derived from a plant according to embodiment 18 and/or from harvestable parts of a plant according to embodiment 19.
[0260] 21. Use of a nucleic acid encoding a DUF642 polypeptide as defined in any of embodiments 1 and 5 to 9 for enhancing yield-related traits in plants relative to control plants, preferably for increasing yield, and more preferably for increasing seed yield and/or for increasing biomass in plants relative to control plants.
[0261] 22. Plant having increased yield, particularly increased biomass and/or increased seed yield, relative to control plants, resulting from modulated expression of a nucleic acid encoding a DUF642 polypeptide, or a transgenic plant cell originating from or being part of said transgenic plant.
[0262] 23. A method for the production of a product comprising the steps of growing the plants of the invention and producing said product from or by
   [0263] a. the plants of the invention; or
   [0264] b. parts, including seeds, of these plants.
[0265] 24. Plant according to embodiment 11, 15, or 21, or a transgenic plant cell originating thereof, or a method according to embodiment 22, wherein said plant is a crop plant, preferably a dicot such as sugar beet, alfalfa, trefoil, chicory, carrot, cassava, cotton, soybean, canola or a monocot, such as sugarcane, or a cereal, such as rice, maize, wheat, barley, millet, rye, triticale, sorghum emmer, spelt, secale, einkorn, teff, milo and oats.
[0266] 25. Construct according to embodiment 12 or 13 comprised in a plant cell.
[0267] 26. Recombinant chromosomal DNA comprising the construct according to embodiment 12 or 13.

[0268] Moreover concerning epimerase-related like polypeptides, the present invention relates to the following specific items:
[0269] 1. A method for enhancing yield-related traits in plants relative to control plants, comprising modulating expression in a plant of a nucleic acid encoding an epimerase-related like polypeptide, wherein said epimerase-related like polypeptide comprises one or more of the following motifs:

(i) Motif 7:
(SEQ ID NO: 273)
CREEGV[DE][QK]VFVD[AG]AH[AS]IG[QSC]V[PDE][VI][DN]
[VM][KR][ED]IGADFY[TV]SNLHKWFFCPP[SA]VAFL[YH],
(ii) Motif 8:
(SEQ ID NO: 274)
EF[SA]HHP[GAN]VAR[IV]NNGSFG[CS]CP[AG]S[VI][LI]AAQ
[ARK][RN]WQ[LR][LRQ]FL[RQA]QPD[AD]FYF[ND]xL[QRK]
[PK]G,
(iii)Motif 9:
(SEQ ID NO: 275)
S[LI]VDNATTAAAIVLQ[VAI][AG][WR][AS]FAEG[RKN]FA[KR]
[GN]D[AVT]V[LV]MLH[YC]AY[GQ][AS]VKKSI[EQH]AYV

[0270] 2. Method according to item 1, wherein said modulated expression is effected by introducing and expressing in a plant said nucleic acid encoding said epimerase-related like polypeptide.
[0271] 3. Method according to item 1 or 2, wherein said enhanced yield-related traits comprise increased yield relative to control plants, and preferably comprise increased biomass and/or increased seed yield relative to control plants.
[0272] 4. Method according to any of items 1 to 3, wherein said epimerase-related like polypeptide as used herein comprises a conserved domain with at least 50% sequence identity to a conserved domain as represented by any one of:
   [0273] amino acid coordinates 32 to 449 in SEQ ID NO:198 (motif 10);
   [0274] amino acid coordinates 47 to 276 in SEQ ID NO:198 (motif 11);
   [0275] amino acid coordinates 92 to 364 in SEQ ID NO:198 (motif 12); and
   [0276] amino acid coordinates 59 to 323 in SEQ ID NO:198 (motif 13).
[0277] 5. Method according to any of items 1 or 4, wherein said nucleic acid encodes a polypeptide having at least 40% overall sequence identity to the amino acid represented by SEQ ID NO: 198.
[0278] 6. Method according to any of items 1 to 5, wherein said nucleic acid encoding said epimerase-related like polypeptide is of plant origin, preferably from a dicotyledonous plant, further preferably from the family Salicaceae, more preferably from the genus Populus, most preferably from Populus trichocarpa.
[0279] 7. Method according to any one of items 1 to 6, wherein said nucleic acid encoding said epimerase-related like polypeptide encodes any one of the polypeptides listed in Table A2 or is a portion of such a nucleic acid, or a nucleic acid capable of hybridising with such a nucleic acid.
[0280] 8. Method according to any one of items 1 to 7, wherein said nucleic acid sequence encodes an orthologue or paralogue of any of the polypeptides given in Table A2.
[0281] 9. Method according to any one of items 1 to 8, wherein said enhanced yield-related traits are obtained under non-stress conditions.
[0282] 10. Method according to any one of items 1 to 8, wherein said enhanced yield-related traits are obtained under conditions of drought stress, salt stress or nitrogen deficiency.
[0283] 11. Method according to any one of items 1 to 10, wherein said nucleic acid is operably linked to a constitutive promoter, preferably to a medium strength constitutive promoter, preferably to a plant promoter, more preferably to a GOS2 promoter, most preferably to a GOS2 promoter from rice.
[0284] 12. Plant, plant part thereof, including seeds, or plant cell, obtainable by a method according to any one of items 1 to 11, wherein said plant, plant part or plant cell comprises a recombinant nucleic acid encoding an epimerase-related like polypeptide as defined in any of items 1 and 4 to 8.
[0285] 13. Plant according to item 12 or a plant cell derived therefrom, wherein said plant is a crop plant, such as beet, sugarbeet or alfalfa; or a monocotyledonous plant such as sugarcane; or a cereal, such as rice, maize, wheat, barley, millet, rye, triticale, sorghum, emmer, spelt, secale, einkorn, teff, milo or oats.
[0286] 14. Construct comprising:
   [0287] (i) nucleic acid encoding an epimerase-related like polypeptide as defined in any of items 1 and 4 to 8;
   [0288] (ii) one or more control sequences capable of driving expression of the nucleic acid sequence of (i); and optionally
   [0289] (iii) a transcription termination sequence.
[0290] 15. Construct according to item 14, wherein one of said control sequences is a constitutive promoter, preferably a medium strength constitutive promoter, preferably to a plant promoter, more preferably a GOS2 promoter, most preferably a GOS2 promoter from rice.
[0291] 16. Use of a construct according to item 14 or 15 in a method for making plants having enhanced yield-related traits, preferably increased yield relative to control plants, and more preferably increased seed yield and/or increased biomass relative to control plants.
[0292] 17. Plant, plant part or plant cell transformed with a construct according to item 14 or 15.
[0293] 18. Plant according to item 17 or a plant cell derived therefrom, wherein said plant is a crop plant, such as beet, sugarbeet or alfalfa; or a monocotyledonous plant such as sugarcane; or a cereal, such as rice, maize, wheat, barley, millet, rye, triticale, sorghum, emmer, spelt, secale, einkorn, teff, milo or oats.
[0294] 19. Method for the production of a transgenic plant having enhanced yield-related traits relative to control plants, preferably increased yield relative to control plants, and more preferably increased seed yield and/or increased biomass relative to control plants, comprising:
   [0295] (i) introducing and expressing in a plant cell or plant a nucleic acid encoding an epimerase-related like polypeptide as defined in any of items 1 and 4 to 8; and
   [0296] (ii) cultivating said plant cell or plant under conditions promoting plant growth and development.
[0297] 20. Transgenic plant having enhanced yield-related traits relative to control plants, preferably increased yield relative to control plants, and more preferably increased seed yield and/or increased biomass, resulting from modulated expression of a nucleic acid encoding an epimerase-related like polypeptide as defined in any of items 1 and 4 to 8; or a transgenic plant cell derived from said transgenic plant.
[0298] 21. Transgenic plant according to item 20 or a transgenic plant cell derived therefrom, wherein said plant is a crop plant, such as beet, sugarbeet or alfalfa; or a monocotyledonous plant such as sugarcane; or a cereal, such as rice, maize, wheat, barley, millet, rye, triticale, sorghum, emmer, spelt, secale, einkorn, teff, milo or oats.
[0299] 22. Harvestable parts of a plant according to any of items 12-13, 17-18 or 20-21, wherein said harvestable parts are preferably shoot biomass and/or seeds.
[0300] 23. Products derived from a plant according to any of items 12-13, 17-18 or 20-21 and/or from harvestable parts of a plant according to item 22.
[0301] 24. Isolated nucleic acid molecule selected from:
   [0302] (i) a nucleic acid represented by SEQ ID NO: 199;
   [0303] (ii) the complement of a nucleic acid represented by SEQ ID NO: 199;
   [0304] (iii) a nucleic acid encoding epimerase-related like polypeptide having in increasing order of preference at least 50%, 51%, 52%, 53%, 54%, 55%, 56%, 57%, 58%, 59%, 60%, 61%, 62%, 63%, 64%, 65%, 66%, 67%, 68%, 69%, 70%, 71%, 72%, 73%, 74%, 75%, 76%, 77%, 78%, 79%, 80%, 81%, 82%, 83%, 84%, 85%, 86%, 87%, 88%, 89%, 90%, 91%, 92%, 93%, 94%, 95%, 96%, 97%, 98%, or 99% sequence identity to the amino acid sequence represented by SEQ ID NO: 200, and additionally or alternatively comprising one or more motifs having in increasing order of preference at least 50%, 55%, 60%, 65%, 70%, 75%, 80%, 85%, 90%, 95%, 96%, 97%, 98%, 99% or more sequence identity to any one or more of the motifs 7 to 13, and further preferably conferring enhanced yield-related traits relative to control plants.
   [0305] (iv) a nucleic acid molecule which hybridizes with a nucleic acid molecule of (i) to (iii) under high stringency hybridization conditions and preferably confers enhanced yield-related traits relative to control plants.
[0306] 25. Isolated polypeptide selected from:
   [0307] (i) an amino acid sequence represented by SEQ ID NO: 200;
   [0308] (ii) an amino acid sequence having, in increasing order of preference, at least 50%, 51%, 52%, 53%, 54%, 55%, 56%, 57%, 58%, 59%, 60%, 61%, 62%, 63%, 64%, 65%, 66%, 67%, 68%, 69%, 70%, 71%, 72%, 73%, 74%, 75%, 76%, 77%, 78%, 79%, 80%, 81%, 82%, 83%, 84%, 85%, 86%, 87%, 88%, 89%, 90%, 91%, 92%, 93%, 94%, 95%, 96%, 97%, 98%, or 99% sequence identity to the amino acid sequence represented by SEQ ID NO: 200, and additionally or alternatively comprising one or more motifs having in increasing order of preference at least 50%, 55%, 60%, 65%, 70%, 75%, 80%, 85%, 90%, 95%, 96%, 97%, 98%, 99% or more sequence identity to any one or more of the motifs 7 to 13, and further preferably conferring enhanced yield-related traits relative to control plants;
   [0309] (iii) derivatives of any of the amino acid sequences given in (i) or (ii) above.
[0310] 26. Use of a nucleic acid encoding an epimerase-related like polypeptide as defined in any of items 1 and 4 to 8 and 25; for enhancing yield-related traits in plants relative to control plants, preferably for increasing yield, and more preferably for increasing seed yield and/or for increasing biomass in plants relative to control plants.
[0311] 27. Use of a nucleic acid as defined in item 24 and encoding an epimerase-related like polypeptide for enhancing yield-related traits in plants relative to control plants, preferably for increasing yield, and more preferably for increasing seed yield in plants relative to control plants.
[0312] 28. Use of a nucleic acid encoding an epimerase-related like polypeptide as defined in any of items 1 and 4 to 8 and 25; as molecular marker.
[0313] 29. Use of a nucleic acid as defined in item 24 and encoding an epimerase-related like polypeptide as defined in any of items 1 and 4 to 8 and 25 as molecular marker.
[0314] 30. A method for the production of a product comprising the steps of growing the plants according to item 12, 18 or 20 and producing said product from or by
   [0315] (i) said plants; or
   [0316] (ii) parts, including seeds, of said plants.
[0317] 31. Construct according to item 14 or 15 comprised in a plant cell.
[0318] 32. Recombinant chromosomal DNA comprising the construct according to item 14 or 15 comprised.

[0319] Moreover concerning epimerase-related like polypeptides, the invention is in particular characterized by any one or more of the following embodiments:
[0320] I. A method for enhancing yield-related traits in plants relative to control plants, comprising modulating expression in a plant of a nucleic acid encoding an epimerase-related like polypeptide by introducing and expressing in a plant said nucleic acid encoding said epimerase-related like polypeptide, wherein said epimerase-related like polypeptide has at least 80% overall sequence identity to the amino acid represented by SEQ ID NO: 198.
[0321] II. Method according to embodiment I, wherein said epimerase-related like polypeptide comprises one or more of the following motifs:

(i) Motif 7:
(SEQ ID NO: 273)
CREEGV[DE][QK]VFVD[AG]AH[AS]IG[QSC]V[PDE][VI][DN]
[VM][KR][ED]IGADFY[TV]SNLHKWFFCPP[SA]VAFL[YH],
(ii) Motif 8:
(SEQ ID NO: 274)
EF[SA]HHP[GAN]VAR[IV]NNGSFG[CS]CP[AG]S[VI][LI]AAQ
[ARK][RN]WQ[LR][LRQ]FL[RQA]QPD[AD]FYF[ND]xL[QRK]
[PK]G,
(iii)Motif 9:
(SEQ ID NO: 275)
S[LI]VDNATTAAAIVLQ[VAI][AG][WR][AS]FAEG[RKN]FA[KR]
[GN]D[AVT]V[LV]MLH[YC]AY[GQ][AS]VKKSI[EQH]AYV

[0322] III. Method according to embodiment I or II, wherein said enhanced yield-related traits comprises increased biomass.
[0323] IV. Method according to any one of embodiments I to III, wherein said enhanced yield-related traits comprises increased seed yield relative to control plants.
[0324] V. Method according to any of embodiments I to IV, wherein said epimerase-related like polypeptide as used herein comprises at least two conserved domains selected from the group comprising PyrdxlP-dep_Trfase_major (SSF53383), PTHR11601, Aminotran_5 (PF00266) and PyrdxlP-dep_Trfase_major sub1 (G3DSA:3.40.640.10), and preferably comprises i) an Aminotran_5 conserved domain and ii) at least one other conserved domain selected from the group comprising PyrdxlP-dep_Trfase_major (SSF53383), PTHR11601, and PyrdxlP-dep_Trfase_major sub1 (G3DSA:3.40.640.10),
[0325] VI. Method according to any of embodiments I to IV, wherein said epimerase-related like polypeptide comprises a conserved domain with at least 50% sequence identity to a conserved domain as represented by any one of:
   [0326] amino acid coordinates 32 to 449 in SEQ ID NO:198 (motif 10);
   [0327] amino acid coordinates 47 to 276 in SEQ ID NO:198 (motif 11);
   [0328] amino acid coordinates 92 to 364 in SEQ ID NO:198 (motif 12); and
   [0329] amino acid coordinates 59 to 323 in SEQ ID NO:198 (motif 13).
[0330] VII. Method according to any of embodiments I to VI, wherein said nucleic acid encoding said epimerase-related like polypeptide is of plant origin, preferably from a dicotyledonous plant, further preferably from the family Salicaceae, more preferably from the genus Populus, most preferably from Populus trichocarpa.
[0331] VIII. Method according to any one of embodiments I to VII, wherein said nucleic acid encoding said epimerase-related like polypeptide encodes any one of the polypeptides listed in Table A2 or is a portion of such a nucleic acid, or a nucleic acid capable of hybridising with such a nucleic acid.
[0332] IX. Method according to any one of embodiments I to VIII, wherein said nucleic acid sequence encodes an orthologue or paralogue of any of the polypeptides given in Table A2.
[0333] X. Method according to any one of embodiments I to IX, wherein said nucleic acid is operably linked to a GOS2 promoter, preferably to a GOS2 promoter from rice.
[0334] XI. Construct comprising:
   [0335] (i) nucleic acid encoding an epimerase-related like polypeptide as defined in any of embodiments I and V to IX;
   [0336] (ii) one or more control sequences capable of driving expression of the nucleic acid sequence of (i), and preferably a constitutive promoter, preferably to a medium strength constitutive promoter, preferably to a plant promoter, more preferably to a GOS2 promoter, most preferably to a GOS2 promoter from rice, and optionally
   [0337] (iii) a transcription termination sequence.
[0338] XII. Plant, plant part or plant cell transformed with a construct according to embodiment XI.
[0339] XIII Method for the production of a transgenic plant having enhanced yield-related traits relative to control plants, preferably increased yield relative to control plants, and more preferably increased seed yield and/or increased biomass relative to control plants, comprising:
   [0340] (i) introducing and expressing in a plant cell or plant a nucleic acid encoding an epimerase-related like polypeptide as defined in any of embodiments I and V to IX; and
   [0341] (ii) cultivating said plant cell or plant under conditions promoting plant growth and development.
[0342] XIV. Transgenic plant having enhanced yield-related traits relative to control plants, preferably increased yield relative to control plants, and more preferably increased seed yield and/or increased biomass, resulting from the introduction and expression therein of a nucleic acid encoding an epimerase-related like polypeptide as defined in any of embodiments I and V to IX; or a transgenic plant cell derived from said transgenic plant.
[0343] XV. Use of a nucleic acid encoding an epimerase-related like polypeptide as defined in any of embodiments I and V to IX; for enhancing yield-related traits in plants relative to control plants, preferably for increasing yield, and more preferably for increasing seed yield and/or for increasing biomass in plants relative to control plants.

[0344] Moreover concerning PLPCase polypeptides, the present invention relates to the following specific embodiments:
[0345] 1. A method for enhancing yield-related traits in plants relative to control plants, comprising modulating expression in a plant of a nucleic acid encoding a Phospholipase/carboxylesterase (PLPCase) polypeptide, wherein said PLPCase polypeptide comprises an InterPro accession IPRO03140 corresponding to PFAM accession number PF022030 Phospholipase/carboxylesterase (PLPCase) domain.
[0346] 2. Method according to embodiment 1, wherein said modulated expression is effected by introducing and expressing in a plant said nucleic acid encoding said PLPCase polypeptide.
[0347] 3. Method according to embodiments 1 or 2, wherein said enhanced yield-related traits comprise increased yield relative to control plants, and preferably comprise increased root biomass and/or increased seed yield relative to control plants.
[0348] 4. Method according to any one of embodiments 1 to 3, wherein said enhanced yield-related traits are obtained under non-stress conditions.
[0349] 5. Method according to any one of embodiments 1 to 3, wherein said enhanced yield-related traits are obtained under conditions of drought stress, salt stress or nitrogen deficiency.
[0350] 6. Method according to any of embodiments 1 to 5, wherein said PLPCase polypeptide comprises one or more of the following motifs:

(i) Motif 14:
(SEQ ID NO: 348)
E[FY]G[KR]T[HY]VVRPKG[KR]HQATIVWLHGLGDNG[LSA]S[SW]
SQLL[ED][ST]LPLPNIKWICPTA,
(ii) Motif 15:
(SEQ ID NO: 349)
PDD[WIVL]EGLDASAAH[IV]ANLLS[TS]EP[AS]D[VI]K[VL]G
[IV]G,
(iii) Motif 16:
(SEQ ID NO: 350)
FSMGAA[IT]ALYSA[TA]C[YF]A[MHL]

[0351] 7. Method according to any one of embodiments 1 to 6, wherein said nucleic acid encoding a PLPCase is of plant origin, preferably from a dicotyledonous plant, further preferably from the family Fabaceae, more preferably from the genus Medicago, most preferably from Medicago truncatula.
[0352] 8. Method according to any one of embodiments 1 to 7, wherein said nucleic acid encoding a PLPCase encodes any one of the polypeptides listed in Table A3 or is a portion of such a nucleic acid, or a nucleic acid capable of hybridising with such a nucleic acid.
[0353] 9. Method according to any one of embodiments 1 to 8, wherein said nucleic acid sequence encodes an orthologue or paralogue of any of the polypeptides given in Table A3.
[0354] 10. Method according to any one of embodiments 1 to 9, wherein said nucleic acid encodes the polypeptide represented by SEQ ID NO: 285.
[0355] 11. Method according to any one of embodiments 1 to 10, wherein said nucleic acid is operably linked to a constitutive promoter, preferably to a medium strength constitutive promoter, preferably to a plant promoter, more preferably to a GOS2 promoter, most preferably to a GOS2 promoter from rice.
[0356] 12. Plant, plant part thereof, including seeds, or plant cell, obtainable by a method according to any one of embodiments 1 to 11, wherein said plant, plant part or plant cell comprises a recombinant nucleic acid encoding a PLPCase polypeptide as defined in any of embodiments 1 and 6 to 10.
[0357] 13. Construct comprising:
   [0358] (i) nucleic acid encoding a PLPCase as defined in any of embodiments 1 and 6 to 10;
   [0359] (ii) one or more control sequences capable of driving expression of the nucleic acid sequence of (i); and optionally
   [0360] (iii) a transcription termination sequence.
[0361] 14. Construct according to embodiment 13, wherein one of said control sequences is a constitutive promoter, preferably a medium strength constitutive promoter, preferably to a plant promoter, more preferably a GOS2 promoter, most preferably a GOS2 promoter from rice.
[0362] 15. Use of a construct according to embodiment 13 or 14 in a method for making plants having enhanced yield-related traits, preferably increased yield relative to control plants, and more preferably increased root biomass, increased greenness index and/or increased seed yield relative to control plants.
[0363] 16. Plant, plant part or plant cell transformed with a construct according to embodiment 13 or 14.
[0364] 17. Method for the production of a transgenic plant having enhanced yield-related traits relative to control plants, preferably increased yield relative to control plants, and more preferably increased root biomass, increased greenness index and/or increased seed yield relative to control plants, comprising:
   [0365] (i) introducing and expressing in a plant cell or plant a nucleic acid encoding a PLPCase polypeptide as defined in any of embodiments 1 and 6 to 10; and
   [0366] (ii) cultivating said plant cell or plant under conditions promoting plant growth and development.
[0367] 18. Transgenic plant having enhanced yield-related traits relative to control plants, preferably increased yield relative to control plants, and more preferably increased seed yield and/or increased biomass, resulting from modulated expression of a nucleic acid encoding a PLPCase polypeptide as defined in any of embodiments 1 and 6 to 10 or a transgenic plant cell derived from said transgenic plant.
[0368] 19. Transgenic plant according to embodiment 12, 16 or 18, or a transgenic plant cell derived therefrom, wherein said plant is a crop plant, such as beet, sugarbeet or alfalfa; or a monocotyledonous plant such as sugarcane; or a cereal, such as rice, maize, wheat, barley, millet, rye, triticale, sorghum, emmer, spelt, secale, einkorn, teff, milo or oats.
[0369] 20. Harvestable parts of a plant according to embodiment 18 or 19, wherein said harvestable parts are preferably root biomass and/or seeds.
[0370] 21. Products derived from a plant according to embodiment 18 or 19 and/or from harvestable parts of a plant according to embodiment 20.
[0371] 22. Use of a nucleic acid encoding a PLPCase polypeptide as defined in any of embodiments 1 and 6 to 10 for enhancing yield-related traits in plants relative to control plants, preferably for increasing yield, and more preferably for root biomass, increased greenness index and/or increased seed yield in plants relative to control plants.
[0372] 23. A method for the production of a product comprising the steps of growing the plants according to embodiment 16, 18 or 19 and producing said product from or by
   [0373] (i) said plants; or
   [0374] (ii) parts, including seeds, of said plants.
[0375] 24. Construct according to embodiment 13 or 14 comprised in a plant cell.

[0376] The present invention also relates to the following embodiments:
[0377] 1. A method for enhancing yield-related traits in plants relative to control plants, comprising introducing and expressing in a plant of a nucleic acid encoding a DUF642 polypeptide, wherein said DUF642 polypeptide comprises the signature sequence FSAARTCAQ (SEQ ID NO: 194).
[0378] 2. Method according to embodiment 1, wherein said nucleic acid encodes the polypeptide represented by SEQ ID NO: 2 or SEQ ID NO: 4 or a nucleic acid encoding a polypeptide having at least 90% sequence identity to SEQ ID NO: 2 and/or SEQ ID NO: 4.
[0379] 3. Method according to any one of embodiments 1 to 9, wherein said nucleic acid is operably linked to a constitutive promoter, preferably to a medium strength constitutive promoter, preferably to a plant promoter, more preferably to a GOS2 promoter, most preferably to a GOS2 promoter from rice.
[0380] 4. Plant, plant part thereof, including seeds, or plant cell, obtainable by a method according to any one of embodiments 1 to 3, wherein said plant, plant part or plant cell comprises a recombinant nucleic acid encoding a DUF642 polypeptide as defined in any of embodiments 1 to 3.
[0381] 5. Construct comprising:
   [0382] (i) nucleic acid encoding a DUF642 as defined in any of embodiments 1 to 3;
   [0383] (ii) one or more control sequences capable of driving expression of the nucleic acid sequence of (i); and optionally
   [0384] (iii) a transcription termination sequence.
[0385] 6. Construct according to embodiment 5, wherein one of said control sequences is a constitutive promoter, preferably a medium strength constitutive promoter, preferably to a plant promoter, more preferably a GOS2 promoter, most preferably a GOS2 promoter from rice.
[0386] 7. Use of a construct according to embodiment 5 or 6 in a method for making plants having enhanced yield-related traits, preferably increased yield relative to control plants, and more preferably increased seed yield and/or increased biomass relative to control plants.
[0387] 8. Plant, plant part or plant cell transformed with a construct according to embodiment 5 or 6.
[0388] 9. Method for the production of a transgenic plant having enhanced yield-related traits relative to control plants, preferably increased yield relative to control plants, and more preferably increased seed yield and/or increased biomass relative to control plants, comprising:
   [0389] (i) introducing and expressing in a plant cell or plant a nucleic acid encoding a DUF642 polypeptide as defined in any of embodiments 1 to 3; and
   [0390] (ii) cultivating said plant cell or plant under conditions promoting plant growth and development.
[0391] 10. Transgenic plant having enhanced yield-related traits relative to control plants, preferably increased yield relative to control plants, and more preferably increased seed yield and/or increased biomass, resulting from modulated expression of a nucleic acid encoding a DUF642 polypeptide as defined in any of embodiments 1 to 3 or a transgenic plant cell derived from said transgenic plant.
[0392] 11. Transgenic plant according to embodiment 4, 8 or 10, or a transgenic plant cell derived therefrom, wherein said plant is a crop plant, such as beet, sugarbeet or alfalfa; or a monocotyledonous plant such as sugarcane; or a cereal, such as rice, maize, wheat, barley, millet, rye, triticale, sorghum, emmer, spelt, einkorn, teff, milo or oats.
[0393] 12. Harvestable parts of a plant according to embodiment 11, wherein said harvestable parts are preferably shoot biomass and/or seeds.
[0394] 13. Products derived from a plant according to embodiment 11 and/or from harvestable parts of a plant according to embodiment 12.
[0395] 14. Use of a nucleic acid encoding a DUF642 polypeptide as defined in any of embodiments 1 to 3 for enhancing yield-related traits in plants relative to control plants, preferably for increasing yield, and more preferably for increasing seed yield and/or for increasing biomass in plants relative to control plants.
[0396] 15. A method for enhancing yield-related traits in plants relative to control plants, comprising modulating expression in a plant of a nucleic acid encoding an epimerase-related like polypeptide by introducing and expressing in a plant said nucleic acid encoding said epimerase-related like polypeptide, wherein said epimerase-related like polypeptide has at least 80% overall sequence identity to the amino acid represented by SEQ ID NO: 198.
[0397] 16. Method according to embodiment 15, wherein said epimerase-related like polypeptide comprises one or more of the following motifs:

(i) Motif 7:
(SEQ ID NO: 273)
CREEGV[DE][QK]VFVD[AG]AH[AS]IG[QSC]V[PDE][VI][DN]
[VM][KR][ED]IGADFY[TV]SNLHKWFFCPP[SA]VAFL[YH],
(ii) Motif 8:
(SEQ ID NO: 274)
EF[SA]HHP[GAN]VAR[IV]NNGSFG[CS]CP[AG]S[VI][LI]AAQ
[ARK][RN]WQ[LR][LRQ]FL[RQA]QPD[AD]FYF[ND]xL[QRK]
[PK]G,
(iii)Motif 9:
(SEQ ID NO: 275)
S[LI]VDNATTAAAIVLQ[VAI][AG][WR][AS]FAEG[RKN]FA[KR]
[GN]D[AVT]V[LV]MLH[YC]AY[GQ][AS]VKKSI[EQH]AYV

[0398] 17. Method according to embodiment 15 or 16, wherein said enhanced yield-related traits comprises increased biomass.
[0399] 18. Method according to any one of embodiments 15 to 17, wherein said enhanced yield-related traits comprises increased seed yield relative to control plants.
[0400] 19. Method according to any of embodiments 15 to 18, wherein said epimerase-related like polypeptide as used herein comprises at least two conserved domains selected from the group comprising PyrdxlP-dep_Trfase_major (SSF53383), PTHR11601, Aminotran_5 (PF00266) and PyrdxlP-dep_Trfase_major sub1 (G3DSA:3.40.640.10), and preferably comprises an Aminotran_5 conserved domain and at least one other conserved domains selected from the group comprising PyrdxlP-dep_Trfase_major (SSF53383), PTHR11601, and PyrdxlP-dep_Trfase_major sub1 (G3DSA:3.40.640.10),
[0401] 20. Method according to any of embodiments 15 to 18, wherein said epimerase-related like polypeptide comprises a conserved domain with at least 50% sequence identity to a conserved domain as represented by any one of:
   [0402] amino acid coordinates 32 to 449 in SEQ ID NO:198 (motif 10);
   [0403] amino acid coordinates 47 to 276 in SEQ ID NO: 198 (motif 11);
   [0404] amino acid coordinates 92 to 364 in SEQ ID NO: 198 (motif 12); and
   [0405] amino acid coordinates 59 to 323 in SEQ ID NO: 198 (motif 13).
[0406] 21. Method according to any of embodiments 15 to 20, wherein said nucleic acid encoding said epimerase-related like polypeptide is of plant origin, preferably from a dicotyledonous plant, further preferably from the family Salicaceae, more preferably from the genus Populus, most preferably from Populus trichocarpa.
[0407] 22. Method according to any one of embodiments 15 to 21, wherein said nucleic acid encoding said epimerase-related like polypeptide encodes any one of the polypeptides listed in Table A or is a portion of such a nucleic acid, or a nucleic acid capable of hybridising with such a nucleic acid.
[0408] 23. Method according to any one of embodiments 15 to 22, wherein said nucleic acid sequence encodes an orthologue or paralogue of any of the polypeptides given in Table A2.
[0409] 24. Method according to any one of embodiments 15 to 23, wherein said nucleic acid is operably linked to a GOS2 promoter, preferably to a GOS2 promoter from rice.
[0410] 25. Construct comprising:
   [0411] (i) nucleic acid encoding an epimerase-related like polypeptide as defined in any of embodiments 15 and 19 to 23;
   [0412] (ii) one or more control sequences capable of driving expression of the nucleic acid sequence of (i), and preferably a constitutive promoter, preferably to a medium strength constitutive promoter, preferably to a plant promoter, more preferably to a GOS2 promoter, most preferably to a GOS2 promoter from rice, and optionally
   [0413] (iii) a transcription termination sequence.
[0414] 26. Plant, plant part or plant cell transformed with a construct according to embodiment 25.
[0415] 27. Method for the production of a transgenic plant having enhanced yield-related traits relative to control plants, preferably increased yield relative to control plants, and more preferably increased seed yield and/or increased biomass relative to control plants, comprising:
   [0416] (i) introducing and expressing in a plant cell or plant a nucleic acid encoding an epimerase-related like polypeptide as defined in any of embodiments 15 and 19 to 23; and
   [0417] (ii) cultivating said plant cell or plant under conditions promoting plant growth and development.
[0418] 28. Transgenic plant having enhanced yield-related traits relative to control plants, preferably increased yield relative to control plants, and more preferably increased seed yield and/or increased biomass, resulting from the introduction and expression therein of a nucleic acid encoding an epimerase-related like polypeptide as defined in any of embodiments 15 and 19 to 23; or a transgenic plant cell derived from said transgenic plant.
[0419] 29. Use of a nucleic acid encoding an epimerase-related like polypeptide as defined in any of embodiments 15 and 19 to 23; for enhancing yield-related traits in plants relative to control plants, preferably for increasing yield, and more preferably for increasing seed yield and/or for increasing biomass in plants relative to control plants.
[0420] 30. A method for enhancing yield-related traits in plants relative to control plants, comprising introducing and expressing in a plant of a nucleic acid encoding SEQ ID NO: 285 or homologues having 80% sequence identity to SEQ ID NO: 285.
[0421] 31. Method according to embodiment 30, wherein said enhanced yield-related traits comprise increased yield relative to control plants, and preferably comprise increased root biomass and/or increased seed yield relative to control plants.
[0422] 32. Method according to any one of embodiments 30 to 31, wherein said enhanced yield-related traits are obtained under non-stress conditions.
[0423] 33. Method according to any one of embodiments 30 to 31, wherein said enhanced yield-related traits are obtained under conditions of drought stress, salt stress or nitrogen deficiency.
[0424] 34. Method according to any one of embodiments 30 to 33, wherein said nucleic acid encoding a PLPCase is of plant origin, preferably from a dicotyledonous plant, further preferably from the family Fabaceae, more preferably from the genus Medicago, most preferably from Medicago truncatula.
[0425] 35. Method according to any one of embodiments 30 to 34, wherein said nucleic acid encoding a PLPCase encodes any one of the polypeptides listed in Table A3 or is a portion of such a nucleic acid, or a nucleic acid capable of hybridising with such a nucleic acid, provided said nucleic acid has 80% sequence identity to SEQ ID NO: 285.
[0426] 36. Method according to any one of embodiments 30 to 35, wherein said nucleic acid is operably linked to a constitutive promoter, preferably to a medium strength constitutive promoter, preferably to a plant promoter, more preferably to a GOS2 promoter, most preferably to a GOS2 promoter from rice.
[0427] 37. Plant, plant part thereof, including seeds, or plant cell, obtainable by a method according to any one of embodiments 30 to 36, wherein said plant, plant part or plant cell comprises a recombinant nucleic acid encoding a PLPCase polypeptide as defined in any of embodiments 30 and 35 to 39.
[0428] 38. Construct comprising:
   [0429] (i) nucleic acid encoding a PLPCase as defined in any of embodiments 30 and 34 to 36;
   [0430] (ii) one or more control sequences capable of driving expression of the nucleic acid sequence of (i); and optionally
   [0431] (iii) a transcription termination sequence.
[0432] 39. Construct according to embodiment 38, wherein one of said control sequences is a constitutive promoter, preferably a medium strength constitutive promoter, preferably to a plant promoter, more preferably a GOS2 promoter, most preferably a GOS2 promoter from rice.
[0433] 40. Use of a construct according to embodiment 38 or 39 in a method for making plants having enhanced yield-related traits, preferably increased yield relative to control plants, and more preferably increased root biomass, increased greenness index and/or increased seed yield relative to control plants.
[0434] 41. Plant, plant part or plant cell transformed with a construct according to embodiment 38 or 39.
[0435] 42. Method for the production of a transgenic plant having enhanced yield-related traits relative to control plants, preferably increased yield relative to control plants, and more preferably increased root biomass, increased greenness index and/or increased seed yield relative to control plants, comprising:
   [0436] a. introducing and expressing in a plant cell or plant a nucleic acid encoding a PLPCase polypeptide as defined in any of embodiments 30 and 34 to 36; and
   [0437] b. cultivating said plant cell or plant under conditions promoting plant growth and development.
[0438] 43. Transgenic plant having enhanced yield-related traits relative to control plants, preferably increased yield relative to control plants, and more preferably increased seed yield and/or increased biomass, resulting from modulated expression of a nucleic acid encoding a PLPCase polypeptide as defined in any of embodiments 30 and 34 to 36 or a transgenic plant cell derived from said transgenic plant.
[0439] 44. Transgenic plant according to embodiment 37, 41 or 43, or a transgenic plant cell derived therefrom, wherein said plant is a crop plant, such as beet, sugarbeet or alfalfa; or a monocotyledonous plant such as sugarcane; or a cereal, such as rice, maize, wheat, barley, millet, rye, triticale, sorghum, emmer, spelt, secale, einkorn, teff, milo or oats.
[0440] 45. Harvestable parts of a plant according to embodiment 43 or 44, wherein said harvestable parts are preferably root biomass and/or seeds.
[0441] 46. Products derived from a plant according to embodiment 43 or 44 and/or from harvestable parts of a plant according to embodiment 45.
[0442] 47. Use of a nucleic acid encoding a PLPCase polypeptide as defined in any of embodiments 30 and 34 to 36 for enhancing yield-related traits in plants relative to control plants, preferably for increasing yield, and more preferably for root biomass, increased greenness index and/or increased seed yield in plants relative to control plants.

### Definitions

[0443] The following definitions will be used throughout the present application. The section captions and headings in this application are for convenience and reference purpose only and should not affect in any way the meaning or interpretation of this application. The technical terms and expressions used within the scope of this application are generally to be given the meaning commonly applied to them in the pertinent art of plant biology, molecular biology, bioinformatics and plant breeding. All of the following term definitions apply to the complete content of this application. The term “essentially”, “about”, “approximately” and the like in connection with an attribute or a value, particularly also define exactly the attribute or exactly the value, respectively. The term “about” in the context of a given numeric value or range relates in particular to a value or range that is within 20%, within 10%, or within 5% of the value or range given. As used herein, the term “comprising” also encompasses the term “consisting of”.

[0444] Peptide(s)/Protein(s)

[0445] The terms “peptides”, “oligopeptides”, “polypeptide” and “protein” are used interchangeably herein and refer to amino acids in a polymeric form of any length, linked together by peptide bonds, unless mentioned herein otherwise.

[0446] Polynucleotide(s)/Nucleic Acid(s)/Nucleic Acid Sequence(s)/Nucleotide Sequence(s)

[0447] The terms “polynucleotide(s)”, “nucleic acid sequence(s)”, “nucleotide sequence(s)”, “nucleic acid(s)”, “nucleic acid molecule” are used interchangeably herein and refer to nucleotides, either ribonucleotides or deoxyribonucleotides or a combination of both, in a polymeric unbranched form of any length.

[0448] Homologue(s)

[0449] “Homologues” of a protein encompass peptides, oligopeptides, polypeptides, proteins and enzymes having amino acid substitutions, deletions and/or insertions relative to the unmodified protein in question and having similar biological and functional activity as the unmodified protein from which they are derived.

[0450] Orthologues and paralogues are two different forms of homologues and encompass evolutionary concepts used to describe the ancestral relationships of genes. Paralogues are genes within the same species that have originated through duplication of an ancestral gene; orthologues are genes from different organisms that have originated through speciation, and are also derived from a common ancestral gene.

[0451] A “deletion” refers to removal of one or more amino acids from a protein.

[0452] An “insertion” refers to one or more amino acid residues being introduced into a predetermined site in a protein. Insertions may comprise N-terminal and/or C-terminal fusions as well as intra-sequence insertions of single or multiple amino acids. Generally, insertions within the amino acid sequence will be smaller than N- or C-terminal fusions, of the order of about 1 to 10 residues. Examples of N- or C-terminal fusion proteins or peptides include the binding domain or activation domain of a transcriptional activator as used in the yeast two-hybrid system, phage coat proteins, (histidine)-6-tag, glutathione S-transferase-tag, protein A, maltose-binding protein, dihydrofolate reductase, Tag⋅100 epitope, c-myc epitope, FLAG®-epitope, lacZ, CMP (calmodulin-binding peptide), HA epitope, protein C epitope and VSV epitope.

[0453] A “substitution” refers to replacement of amino acids of the protein with other amino acids having similar properties (such as similar hydrophobicity, hydrophilicity, antigenicity, propensity to form or break α-helical structures or β-sheet structures). Amino acid substitutions are typically of single residues, but may be clustered depending upon functional constraints placed upon the polypeptide and may range from 1 to 10 amino acids. The amino acid substitutions are preferably conservative amino acid substitutions. Conservative substitution tables are well known in the art (see for example Creighton (1984) Proteins. W.H. Freeman and Company (Eds) and Table 1 below).

TABLE 1
Examples of conserved amino acid substitutions

| Residue | Conservative Substitutions |
|---|---|
| Ala | Ser |
| Arg | Lys |
| Asn | Gln; His |
| Asp | Glu |
| Gln | Asn |
| Cys | Ser |
| Glu | Asp |
| Gly | Pro |
| His | Asn; Gln |
| Ile | Leu, Val |
| Leu | Ile; Val |
| Lys | Arg; Gln |
| Met | Leu; Ile |
| Phe | Met; Leu; Tyr |
| Ser | Thr; Gly |
| Thr | Ser; Val |
| Trp | Tyr |
| Tyr | Trp; Phe |
| Val | Ile; Leu |

[0454] Amino acid substitutions, deletions and/or insertions may readily be made using peptide synthetic techniques known in the art, such as solid phase peptide synthesis and the like, or by recombinant DNA manipulation. Methods for the manipulation of DNA sequences to produce substitution, insertion or deletion variants of a protein are well known in the art. For example, techniques for making substitution mutations at predetermined sites in DNA are well known to those skilled in the art and include M13 mutagenesis, T7-Gen in vitro mutagenesis (USB, Cleveland, Ohio), QuickChange Site Directed mutagenesis (Stratagene, San Diego, Calif.), PCR-mediated site-directed mutagenesis or other site-directed mutagenesis protocols (see Current Protocols in Molecular Biology, John Wiley & Sons, N.Y. (1989 and yearly updates)).

[0455] Derivatives

[0456] “Derivatives” include peptides, oligopeptides, polypeptides which may, compared to the amino acid sequence of the naturally-occurring form of the protein, such as the protein of interest, comprise substitutions of amino acids with non-naturally occurring amino acid residues, or additions of non-naturally occurring amino acid residues. “Derivatives” of a protein also encompass peptides, oligopeptides, polypeptides which comprise naturally occurring altered (glycosylated, acylated, prenylated, phosphorylated, myristoylated, sulphated etc.) or non-naturally altered amino acid residues compared to the amino acid sequence of a naturally-occurring form of the polypeptide. A derivative may also comprise one or more non-amino acid substituents or additions compared to the amino acid sequence from which it is derived, for example a reporter molecule or other ligand, covalently or non-covalently bound to the amino acid sequence, such as a reporter molecule which is bound to facilitate its detection, and non-naturally occurring amino acid residues relative to the amino acid sequence of a naturally-occurring protein. Furthermore, “derivatives” also include fusions of the naturally-occurring form of the protein with tagging peptides such as FLAG, HIS6 or thioredoxin (for a review of tagging peptides, see Terpe, Appl. Microbiol. Biotechnol. 60, 523-533, 2003).

[0457] Domain, Motif/Consensus Sequence/Signature

[0458] The term “domain” refers to a set of amino acids conserved at specific positions along an alignment of sequences of evolutionarily related proteins. While amino acids at other positions can vary between homologues, amino acids that are highly conserved at specific positions indicate amino acids that are likely essential in the structure, stability or function of a protein. Identified by their high degree of conservation in aligned sequences of a family of protein homologues, they can be used as identifiers to determine if any polypeptide in question belongs to a previously identified polypeptide family.

[0459] The term “motif” or “consensus sequence” or “signature” refers to a short conserved region in the sequence of evolutionarily related proteins. Motifs are frequently highly conserved parts of domains, but may also include only part of the domain, or be located outside of conserved domain (if all of the amino acids of the motif fall outside of a defined domain).

[0460] Specialist databases exist for the identification of domains, for example, SMART (Schultz et al. (1998) Proc. Natl. Acad. Sci. USA 95, 5857-5864; Letunic et al. (2002) Nucleic Acids Res 30, 242-244), InterPro (Mulder et al., (2003) Nucl. Acids. Res. 31, 315-318), Prosite (Bucher and Bairoch (1994), A generalized profile syntax for biomolecular sequences motifs and its function in automatic sequence interpretation. (In) ISMB-94; Proceedings 2nd International Conference on Intelligent Systems for Molecular Biology. Altman R., Brutlag D., Karp P., Lathrop R., Searls D., Eds., pp 53-61, AAAI Press, Menlo Park; Hulo et al., Nucl. Acids. Res. 32:D134-D137, (2004)), or Pfam (Bateman et al., Nucleic Acids Research 30(1): 276-280 (2002)). A set of tools for in silico analysis of protein sequences is available on the ExPASy proteomics server (Swiss Institute of Bioinformatics (Gasteiger et al., ExPASy: the proteomics server for in-depth protein knowledge and analysis, Nucleic Acids Res. 31:3784-3788(2003)). Domains or motifs may also be identified using routine techniques, such as by sequence alignment.

[0461] Methods for the alignment of sequences for comparison are well known in the art, such methods include GAP, BESTFIT, BLAST, FASTA and TFASTA. GAP uses the algorithm of Needleman and Wunsch ((1970) J Mol Biol 48: 443-453) to find the global (i.e. spanning the complete sequences) alignment of two sequences that maximizes the number of matches and minimizes the number of gaps. The BLAST algorithm (Altschul et al. (1990) J Mol Biol 215: 403-10) calculates percent sequence identity and performs a statistical analysis of the similarity between the two sequences. The software for performing BLAST analysis is publicly available through the National Centre for Biotechnology Information (NCBI). Homologues may readily be identified using, for example, the ClustalW multiple sequence alignment algorithm (version 1.83), with the default pairwise alignment parameters, and a scoring method in percentage. Global percentages of similarity and identity may also be determined using one of the methods available in the MatGAT software package (Campanella et al., BMC Bioinformatics. 2003 Jul. 10; 4:29. MatGAT: an application that generates similarity/identity matrices using protein or DNA sequences.). Minor manual editing may be performed to optimise alignment between conserved motifs, as would be apparent to a person skilled in the art. Furthermore, instead of using full-length sequences for the identification of homologues, specific domains may also be used. The sequence identity values may be determined over the entire nucleic acid or amino acid sequence or over selected domains or conserved motif(s), using the programs mentioned above using the default parameters. For local alignments, the Smith-Waterman algorithm is particularly useful (Smith T F, Waterman M S (1981) J. Mol. Biol 147(1); 195-7).

[0462] Reciprocal BLAST

[0463] Typically, this involves a first BLAST involving BLASTing a query sequence (for example using any of the sequences listed in Table A of the Examples section) against any sequence database, such as the publicly available NCBI database. BLASTN or TBLASTX (using standard default values) are generally used when starting from a nucleotide sequence, and BLASTP or TBLASTN (using standard default values) when starting from a protein sequence. The BLAST results may optionally be filtered. The full-length sequences of either the filtered results or non-filtered results are then BLASTed back (second BLAST) against sequences from the organism from which the query sequence is derived. The results of the first and second BLASTs are then compared. A paralogue is identified if a high-ranking hit from the first blast is from the same species as from which the query sequence is derived, a BLAST back then ideally results in the query sequence amongst the highest hits; an orthologue is identified if a high-ranking hit in the first BLAST is not from the same species as from which the query sequence is derived, and preferably results upon BLAST back in the query sequence being among the highest hits.

[0464] High-ranking hits are those having a low E-value. The lower the E-value, the more significant the score (or in other words the lower the chance that the hit was found by chance). Computation of the E-value is well known in the art. In addition to E-values, comparisons are also scored by percentage identity. Percentage identity refers to the number of identical nucleotides (or amino acids) between the two compared nucleic acid (or polypeptide) sequences over a particular length. In the case of large families, ClustalW may be used, followed by a neighbour joining tree, to help visualize clustering of related genes and to identify orthologues and paralogues.

[0465] Hybridisation

[0466] The term “hybridisation” as defined herein is a process wherein substantially homologous complementary nucleotide sequences anneal to each other. The hybridisation process can occur entirely in solution, i.e. both complementary nucleic acids are in solution. The hybridisation process can also occur with one of the complementary nucleic acids immobilised to a matrix such as magnetic beads, Sepharose beads or any other resin. The hybridisation process can furthermore occur with one of the complementary nucleic acids immobilised to a solid support such as a nitro-cellulose or nylon membrane or immobilised by e.g. photolithography to, for example, a siliceous glass support (the latter known as nucleic acid arrays or microarrays or as nucleic acid chips). In order to allow hybridisation to occur, the nucleic acid molecules are generally thermally or chemically denatured to melt a double strand into two single strands and/or to remove hairpins or other secondary structures from single stranded nucleic acids.

[0467] The term “stringency” refers to the conditions under which a hybridisation takes place. The stringency of hybridisation is influenced by conditions such as temperature, salt concentration, ionic strength and hybridisation buffer composition. Generally, low stringency conditions are selected to be about 30° C. lower than the thermal melting point (Tₘ) for the specific sequence at a defined ionic strength and pH. Medium stringency conditions are when the temperature is 20° C. below Tₘ, and high stringency conditions are when the temperature is 10° C. below Tₘ. High stringency hybridisation conditions are typically used for isolating hybridising sequences that have high sequence similarity to the target nucleic acid sequence. However, nucleic acids may deviate in sequence and still encode a substantially identical polypeptide, due to the degeneracy of the genetic code. Therefore medium stringency hybridisation conditions may sometimes be needed to identify such nucleic acid molecules.

[0468] The Tₘ is the temperature under defined ionic strength and pH, at which 50% of the target sequence hybridises to a perfectly matched probe. The Tₘ is dependent upon the solution conditions and the base composition and length of the probe. For example, longer sequences hybridise specifically at higher temperatures. The maximum rate of hybridisation is obtained from about 16° C. up to 32° C. below Tₘ. The presence of monovalent cations in the hybridisation solution reduce the electrostatic repulsion between the two nucleic acid strands thereby promoting hybrid formation; this effect is visible for sodium concentrations of up to 0.4M (for higher concentrations, this effect may be ignored). Formamide reduces the melting temperature of DNA-DNA and DNA-RNA duplexes with 0.6 to 0.7° C. for each percent formamide, and addition of 50% formamide allows hybridisation to be performed at 30 to 45° C., though the rate of hybridisation will be lowered. Base pair mismatches reduce the hybridisation rate and the thermal stability of the duplexes. On average and for large probes, the Tm decreases about 1° C. per % base mismatch. The Tₘ may be calculated using the following equations, depending on the types of hybrids:

[0469] 1) DNA-DNA hybrids (Meinkoth and Wahl, Anal. Biochem., 138: 267-284, 1984):

Tₘ=81.5° C.+16.6×log₁₀[Na⁺]^{a}+0.41x %[G/C^{b}]−500x[L^{c}]⁻¹−0.61x % formamide

[0470] 2) DNA-RNA or RNA-RNA hybrids:

Tₘ=79.8° C.+18.5(log₁₀[Na⁺]^{a})+0.58(% G/C^{b})+11.8(% G/C^{b})²−820/L^{c}

[0471] 3) oligo-DNA or oligo-RNA^{d} hybrids:

[0472] For <20 nucleotides: Tₘ=2 (lₐ)

[0473] For 20-35 nucleotides: Tₘ=22+1.46 (lₙ)

^{a} or for other monovalent cation, but only accurate in the 0.01-0.4 M range.
^{b} only accurate for % GC in the 30% to 75% range.
^{c} L=length of duplex in base pairs.
^{d} oligo, oligonucleotide; lₙ, =effective length of primer=2×(no. of G/C)+(no. of A/T).

[0474] Non-specific binding may be controlled using any one of a number of known techniques such as, for example, blocking the membrane with protein containing solutions, additions of heterologous RNA, DNA, and SDS to the hybridisation buffer, and treatment with Rnase. For non-homologous probes, a series of hybridizations may be performed by varying one of (i) progressively lowering the annealing temperature (for example from 68° C. to 42° C.) or (ii) progressively lowering the formamide concentration (for example from 50% to 0%). The skilled artisan is aware of various parameters which may be altered during hybridisation and which will either maintain or change the stringency conditions.

[0475] Besides the hybridisation conditions, specificity of hybridisation typically also depends on the function of post-hybridisation washes. To remove background resulting from non-specific hybridisation, samples are washed with dilute salt solutions. Critical factors of such washes include the ionic strength and temperature of the final wash solution: the lower the salt concentration and the higher the wash temperature, the higher the stringency of the wash. Wash conditions are typically performed at or below hybridisation stringency. A positive hybridisation gives a signal that is at least twice of that of the background. Generally, suitable stringent conditions for nucleic acid hybridisation assays or gene amplification detection procedures are as set forth above. More or less stringent conditions may also be selected. The skilled artisan is aware of various parameters which may be altered during washing and which will either maintain or change the stringency conditions.

[0476] For example, typical high stringency hybridisation conditions for DNA hybrids longer than 50 nucleotides encompass hybridisation at 65° C. in 1×SSC or at 42° C. in 1×SSC and 50% formamide, followed by washing at 65° C. in 0.3×SSC. Examples of medium stringency hybridisation conditions for DNA hybrids longer than 50 nucleotides encompass hybridisation at 50° C. in 4×SSC or at 40° C. in 6×SSC and 50% formamide, followed by washing at 50° C. in 2×SSC. The length of the hybrid is the anticipated length for the hybridising nucleic acid. When nucleic acids of known sequence are hybridised, the hybrid length may be determined by aligning the sequences and identifying the conserved regions described herein. 1×SSC is 0.15M NaCl and 15 mM sodium citrate; the hybridisation solution and wash solutions may additionally include 5×Denhardt's reagent, 0.5-1.0% SDS, 100 μg/ml denatured, fragmented salmon sperm DNA, 0.5% sodium pyrophosphate.

[0477] For the purposes of defining the level of stringency, reference can be made to Sambrook et al. (2001) Molecular Cloning: a laboratory manual, 3^{rd} Edition, Cold Spring Harbor Laboratory Press, CSH, New York or to Current Protocols in Molecular Biology, John Wiley & Sons, N.Y. (1989 and yearly updates).

[0478] Splice Variant

[0479] The term “splice variant” as used herein encompasses variants of a nucleic acid sequence in which selected introns and/or exons have been excised, replaced, displaced or added, or in which introns have been shortened or lengthened. Such variants will be ones in which the biological activity of the protein is substantially retained; this may be achieved by selectively retaining functional segments of the protein. Such splice variants may be found in nature or may be manmade. Methods for predicting and isolating such splice variants are well known in the art (see for example Foissac and Schiex (2005) BMC Bioinformatics 6: 25).

[0480] Allelic Variant

[0481] “Alleles” or “allelic variants” are alternative forms of a given gene, located at the same chromosomal position. Allelic variants encompass Single Nucleotide Polymorphisms (SNPs), as well as Small Insertion/Deletion Polymorphisms (INDELs). The size of INDELs is usually less than 100 bp. SNPs and INDELs form the largest set of sequence variants in naturally occurring polymorphic strains of most organisms.

[0482] Endogenous Gene

[0483] Reference herein to an “endogenous” gene not only refers to the gene in question as found in a plant in its natural form (i.e., without there being any human intervention), but also refers to that same gene (or a substantially homologous nucleic acid/gene) in an isolated form subsequently (re)introduced into a plant (a transgene). For example, a transgenic plant containing such a transgene may encounter a substantial reduction of the transgene expression and/or substantial reduction of expression of the endogenous gene. The isolated gene may be isolated from an organism or may be manmade, for example by chemical synthesis.

[0484] Gene Shuffling/Directed Evolution

[0485] “Gene shuffling” or “directed evolution” consists of iterations of DNA shuffling followed by appropriate screening and/or selection to generate variants of nucleic acids or portions thereof encoding proteins having a modified biological activity (Castle et al., (2004) Science 304(5674): 1151-4; U.S. Pat. Nos. 5,811,238 and 6,395,547).

[0486] Construct

[0487] Artificial DNA (such as but, not limited to plasmids or viral DNA) capable of replication in a host cell and used for introduction of a DNA sequence of interest into a host cell or host organism. Host cells of the invention may be any cell selected from bacterial cells, such as Escherichia coli or Agrobacterium species cells, yeast cells, fungal, algal or cyanobacterial cells or plant cells. The skilled artisan is well aware of the genetic elements that must be present on the genetic construct in order to successfully transform, select and propagate host cells containing the sequence of interest. The sequence of interest is operably linked to one or more control sequences (at least to a promoter) as described herein. Additional regulatory elements may include transcriptional as well as translational enhancers. Those skilled in the art will be aware of terminator and enhancer sequences that may be suitable for use in performing the invention. An intron sequence may also be added to the 5′ untranslated region (UTR) or in the coding sequence to increase the amount of the mature message that accumulates in the cytosol, as described in the definitions section. Other control sequences (besides promoter, enhancer, silencer, intron sequences, 3′UTR and/or 5′UTR regions) may be protein and/or RNA stabilizing elements. Such sequences would be known or may readily be obtained by a person skilled in the art.

[0488] The genetic constructs of the invention may further include an origin of replication sequence that is required for maintenance and/or replication in a specific cell type. One example is when a genetic construct is required to be maintained in a bacterial cell as an episomal genetic element (e.g. plasmid or cosmid molecule). Preferred origins of replication include, but are not limited to, the f1-ori and colE1.

[0489] For the detection of the successful transfer of the nucleic acid sequences as used in the methods of the invention and/or selection of transgenic plants comprising these nucleic acids, it is advantageous to use marker genes (or reporter genes). Therefore, the genetic construct may optionally comprise a selectable marker gene. Selectable markers are described in more detail in the “definitions” section herein. The marker genes may be removed or excised from the transgenic cell once they are no longer needed. Techniques for marker removal are known in the art, useful techniques are described above in the definitions section.

[0490] Regulatory Element/Control Sequence/Promoter

[0491] The terms “regulatory element”, “control sequence” and “promoter” are all used interchangeably herein and are to be taken in a broad context to refer to regulatory nucleic acid sequences capable of effecting expression of the sequences to which they are ligated. The term “promoter” typically refers to a nucleic acid control sequence located upstream from the transcriptional start of a gene and which is involved in recognising and binding of RNA polymerase and other proteins, thereby directing transcription of an operably linked nucleic acid. Encompassed by the aforementioned terms are transcriptional regulatory sequences derived from a classical eukaryotic genomic gene (including the TATA box which is required for accurate transcription initiation, with or without a CCAAT box sequence) and additional regulatory elements (i.e. upstream activating sequences, enhancers and silencers) which alter gene expression in response to developmental and/or external stimuli, or in a tissue-specific manner. Also included within the term is a transcriptional regulatory sequence of a classical prokaryotic gene, in which case it may include a −35 box sequence and/or −10 box transcriptional regulatory sequences. The term “regulatory element” also encompasses a synthetic fusion molecule or derivative that confers, activates or enhances expression of a nucleic acid molecule in a cell, tissue or organ.

[0492] A “plant promoter” comprises regulatory elements, which mediate the expression of a coding sequence segment in plant cells. Accordingly, a plant promoter need not be of plant origin, but may originate from viruses or micro-organisms, for example from viruses which attack plant cells. The “plant promoter” can also originate from a plant cell, e.g. from the plant which is transformed with the nucleic acid sequence to be expressed in the inventive process and described herein. This also applies to other “plant” regulatory signals, such as “plant” terminators. The promoters upstream of the nucleotide sequences useful in the methods of the present invention can be modified by one or more nucleotide substitution(s), insertion(s) and/or deletion(s) without interfering with the functionality or activity of either the promoters, the open reading frame (ORF) or the 3′-regulatory region such as terminators or other 3′ regulatory regions which are located away from the ORF. It is furthermore possible that the activity of the promoters is increased by modification of their sequence, or that they are replaced completely by more active promoters, even promoters from heterologous organisms. For expression in plants, the nucleic acid molecule must, as described above, be linked operably to or comprise a suitable promoter which expresses the gene at the right point in time and with the required spatial expression pattern.

[0493] For the identification of functionally equivalent promoters, the promoter strength and/or expression pattern of a candidate promoter may be analysed for example by operably linking the promoter to a reporter gene and assaying the expression level and pattern of the reporter gene in various tissues of the plant. Suitable well-known reporter genes include for example beta-glucuronidase or beta-galactosidase. The promoter activity is assayed by measuring the enzymatic activity of the beta-glucuronidase or beta-galactosidase. The promoter strength and/or expression pattern may then be compared to that of a reference promoter (such as the one used in the methods of the present invention). Alternatively, promoter strength may be assayed by quantifying mRNA levels or by comparing mRNA levels of the nucleic acid used in the methods of the present invention, with mRNA levels of housekeeping genes such as 18S rRNA, using methods known in the art, such as Northern blotting with densitometric analysis of autoradiograms, quantitative real-time PCR or RT-PCR (Heid et al., 1996 Genome Methods 6: 986-994). Generally by “weak promoter” is intended a promoter that drives expression of a coding sequence at a low level. By “low level” is intended at levels of about 1/10,000 transcripts to about 1/100,000 transcripts, to about 1/500,0000 transcripts per cell. Conversely, a “strong promoter” drives expression of a coding sequence at high level, or at about 1/10 transcripts to about 1/100 transcripts to about 1/1000 transcripts per cell. Generally, by “medium strength promoter” is intended a promoter that drives expression of a coding sequence at a lower level than a strong promoter, in particular at a level that is in all instances below that obtained when under the control of a 35S CaMV promoter.

[0494] Operably Linked

[0495] The term “operably linked” as used herein refers to a functional linkage between the promoter sequence and the gene of interest, such that the promoter sequence is able to initiate transcription of the gene of interest.

[0496] Constitutive Promoter

[0497] A “constitutive promoter” refers to a promoter that is transcriptionally active during most, but not necessarily all, phases of growth and development and under most environmental conditions, in at least one cell, tissue or organ. Table 2a below gives examples of constitutive promoters.

TABLE 2a
Examples of constitutive promoters

| Gene Source | Reference |
|---|---|
| Actin | McElroy et al, Plant Cell, 2: 163-171, 1990 |
| HMGP | WO 2004/070039 |
| CAMV 35S | Odell et al, Nature, 313: 810-812, 1985 |
| CaMV 19S | Nilsson et al., Physiol. Plant. 100: 456-462, 1997 |
| GOS2 | de Pater et al, Plant J Nov; 2(6): 837-44, 1992, |
| | WO 2004/065596 |
| Ubiquitin | Christensen et al, Plant Mol. Biol. 18: 675-689, 1992 |
| Rice cyclophilin | Buchholz et al, Plant Mol Biol. 25(5): 837-43, 1994 |
| Maize H3 histone | Lepetit et al, Mol. Gen. Genet. 231: 276-285, 1992 |
| Alfalfa H3 | Wu et al. Plant Mol. Biol. 11: 641-649, 1988 |
| histone | |
| Actin 2 | An et al, Plant J. 10(1); 107-121, 1996 |
| 34S FMV | Sanger et al., Plant. Mol. Biol., 14, 1990: 433-443 |
| Rubisco small | U.S. Pat. No. 4,962,028 |
| subunit | |
| OCS | Leisner (1988) Proc Natl Acad Sci USA 85(5): 2553 |
| SAD1 | Jain et al., Crop Science, 39 (6), 1999: 1696 |
| SAD2 | Jain et al., Crop Science, 39 (6), 1999: 1696 |
| nos | Shaw et al. (1984) Nucleic Acids Res. 12(20): |
| | 7831-7846 |
| V-ATPase | WO 01/14572 |
| Super promoter | WO 95/14098 |
| G-box proteins | WO 94/12015 |

[0498] Ubiquitous Promoter

[0499] A “ubiquitous promoter” is active in substantially all tissues or cells of an organism.

[0500] Developmentally-Regulated Promoter

[0501] A “developmentally-regulated promoter” is active during certain developmental stages or in parts of the plant that undergo developmental changes.

[0502] Inducible Promoter

[0503] An “inducible promoter” has induced or increased transcription initiation in response to a chemical (for a review see Gatz 1997, Annu. Rev. Plant Physiol. Plant Mol. Biol., 48:89-108), environmental or physical stimulus, or may be “stress-inducible”, i.e. activated when a plant is exposed to various stress conditions, or a “pathogen-inducible” i.e. activated when a plant is exposed to exposure to various pathogens.

[0504] Organ-Specific/Tissue-Specific Promoter

[0505] An “organ-specific” or “tissue-specific promoter” is one that is capable of preferentially initiating transcription in certain organs or tissues, such as the leaves, roots, seed tissue etc. For example, a “root-specific promoter” is a promoter that is transcriptionally active predominantly in plant roots, substantially to the exclusion of any other parts of a plant, whilst still allowing for any leaky expression in these other plant parts. Promoters able to initiate transcription in certain cells only are referred to herein as “cell-specific”.

[0506] Examples of root-specific promoters are listed in Table 2b below:

TABLE 2b
Examples of root-specific promoters

| Gene Source | Reference |
|---|---|
| RCc3 | Plant Mol Biol. 1995 January; 27(2): 237-48 |
| Arabidopsis PHT1 | Koyama et al. J Biosci Bioeng. 2005 January; |
| | 99(1): 38-42.; Mudge et al. (2002, Plant J. 31: |
| | 341) |
| Medicago phosphate | Xiao et al., 2006, Plant Biol (Stuttg). 2006 July; |
| transporter | 8(4): 439-49 |
| Arabidopsis Pyk10 | Nitz et al. (2001) Plant Sci 161(2): 337-346 |
| root-expressible genes | Tingey et al., EMBO J. 6: 1, 1987. |
| tobacco auxin- | Van der Zaal et al., Plant Mol. Biol. 16, |
| inducible gene | 983, 1991. |
| β-tubulin | Oppenheimer, et al., Gene 63: 87, 1988. |
| tobacco root- | Conkling, et al., Plant Physiol. 93: 1203, 1990. |
| specific genes | |
| B. napus G1-3b gene | U.S. Pat. No. 5,401,836 |
| SbPRP1 | Suzuki et al., Plant Mol. Biol. 21: 109-119, |
| | 1993. |
| LRX1 | Baumberger et al. 2001, Genes & Dev. 15: 1128 |
| BTG-26 Brassica | US 20050044585 |
| napus | |
| LeAMT1 (tomato) | Lauter et al. (1996, PNAS 3: 8139) |
| The LeNRT1-1 | Lauter et al. (1996, PNAS 3: 8139) |
| (tomato) | |
| class I patatin | Liu et al., Plant Mol. Biol. 7 (6): 1139-1154 |
| gene (potato) | |
| KDC1 (Daucus | Downey et al. (2000, J. Biol. Chem. 275: 39420) |
| carota) | |
| TobRB7 gene | W Song (1997) PhD Thesis, North Carolina State |
| | University, Raleigh, NC USA |
| OsRAB5a (rice) | Wang et al. 2002, Plant Sci. 163: 273 |
| ALF5 (Arabidopsis) | Diener et al. (2001, Plant Cell 13: 1625) |
| NRT2; 1Np (N. | Quesada et al. (1997, Plant Mol. Biol. 34: 265) |
| plumbaginifolia) | |

[0507] A “seed-specific promoter” is transcriptionally active predominantly in seed tissue, but not necessarily exclusively in seed tissue (in cases of leaky expression). The seed-specific promoter may be active during seed development and/or during germination. The seed specific promoter may be endosperm/aleurone/embryo specific. Examples of seed-specific promoters (endosperm/aleurone/embryo specific) are shown in Table 2c to Table 2f below. Further examples of seed-specific promoters are given in Qing Qu and Takaiwa (Plant Biotechnol. J. 2, 113-125, 2004), which disclosure is incorporated by reference herein as if fully set forth.

TABLE 2c
Examples of seed-specific promoters

| Gene source | Reference |
|---|---|
| seed-specific genes | Simon et al., Plant Mol. Biol. 5: 191, 1985; |
| | Scofield et al., J. Biol. Chem. 262: 12202, 1987.; |
| | Baszczynski et al., Plant Mol. Biol. 14: 633, 1990. |
| Brazil Nut albumin | Pearson et al., Plant Mol. Biol. 18: 235-245, 1992. |
| legumin | Ellis et al., Plant Mol. Biol. 10: 203-214, 1988. |
| glutelin (rice) | Takaiwa et al., Mol. Gen. Genet. 208: 15-22, 1986; |
| | Takaiwa et al., FEBS Letts. 221: 43-47, 1987. |
| zein | Matzke et al Plant Mol Biol, 14(3): 323-32 1990 |
| napA | Stalberg et al, Planta 199: 515-519, 1996. |
| wheat LMW and HMW | Mol Gen Genet 216: 81-90, 1989; NAR 17: 461-2, 1989 |
| glutenin-1 | |
| wheat SPA | Albani et al, Plant Cell, 9: 171-184, 1997 |
| wheat α, β, γ-gliadins | EMBO J. 3: 1409-15, 1984 |
| barley Itr1 promoter | Diaz et al. (1995) Mol Gen Genet 248(5): 592-8 |
| barley B1, C, D, hordein | Theor Appl Gen 98: 1253-62, 1999; Plant J 4: 343-55, |
| | 1993; Mol Gen Genet 250: 750-60, 1996 |
| barley DOF | Mena et al, The Plant Journal, 116(1): 53-62, 1998 |
| blz2 | EP99106056.7 |
| synthetic promoter | Vicente-Carbajosa et al., Plant J. 13: 629-640, 1998. |
| rice prolamin NRP33 | Wu et al, Plant Cell Physiology 39(8) 885-889, 1998 |
| rice a-globulin Glb-1 | Wu et al, Plant Cell Physiology 39(8) 885-889, 1998 |
| rice OSH1 | Sato et al, Proc. Natl. Acad. Sci. USA, 93: 8117-8122, |
| | 1996 |
| rice α-globulin REB/OHP-1 | Nakase et al. Plant Mol. Biol. 33: 513-522, 1997 |
| rice ADP-glucose pyrophos- | Trans Res 6: 157-68, 1997 |
| phorylase | |
| maize ESR gene family | Plant J 12: 235-46, 1997 |
| sorghum α-kafirin | DeRose et al., Plant Mol. Biol 32: 1029-35, 1996 |
| KNOX | Postma-Haarsma et al, Plant Mol. Biol. 39: 257-71, 1999 |
| rice oleosin | Wu et al, J. Biochem. 123: 386, 1998 |
| sunflower oleosin | Cummins et al., Plant Mol. Biol. 19: 873-876, 1992 |
| PRO0117, putative rice 40S | WO 2004/070039 |
| ribosomal protein | |
| PRO0136, rice alanine | unpublished |
| aminotransferase | |
| PRO0147, trypsin inhibitor | unpublished |
| ITR1 (barley) | |
| PRO0151, rice WSI18 | WO 2004/070039 |
| PRO0175, rice RAB21 | WO 2004/070039 |
| PRO005 | WO 2004/070039 |
| PRO0095 | WO 2004/070039 |
| α-amylase (Amy32b) | Lanahan et al, Plant Cell 4: 203-211, 1992; Skriver et al, |
| | Proc Natl Acad Sci USA 88: 7266-7270, 1991 |
| cathepsin β-like gene | Cejudo et al, Plant Mol Biol 20: 849-856, 1992 |
| Barley Ltp2 | Kalla et al., Plant J. 6: 849-60, 1994 |
| Chi26 | Leah et al., Plant J. 4: 579-89, 1994 |
| Maize B-Peru | Selinger et al., Genetics 149; 1125-38, 1998 |

TABLE 2d
examples of endosperm-specific promoters

| Gene source | Reference |
|---|---|
| glutelin (rice) | Takaiwa et al. (1986) Mol Gen Genet 208: 15-22; |
| | Takaiwa et al. (1987) FEBS Letts. 221: 43-47 |
| zein | Matzke et al., (1990) Plant Mol Biol 14(3): 323-32 |
| wheat LMW | Colot et al. (1989) Mol Gen Genet 216: 81-90, |
| and HMW | Anderson et al. (1989) NAR 17: 461-2 |
| glutenin-1 | |
| wheat SPA | Albani et al. (1997) Plant Cell 9: 171-184 |
| wheat gliadins | Rafalski et al. (1984) EMBO 3: 1409-15 |
| barley Itr1 | Diaz et al. (1995) Mol Gen Genet 248(5): 592-8 |
| promoter | |
| barley B1, C, D, | Cho et al. (1999) Theor Appl Genet 98: 1253-62; |
| hordein | Muller et al. (1993) Plant J 4: 343-55; |
| | Sorenson et al. (1996) Mol Gen Genet 250: 750-60 |
| barley DOF | Mena et al, (1998) Plant J 116(1): 53-62 |
| blz2 | Onate et al. (1999) J Biol Chem 274(14): 9175-82 |
| synthetic promoter | Vicente-Carbajosa et al. (1998) Plant J 13: 629-640 |
| rice prolamin | Wu et al, (1998) Plant Cell Physiol 39(8) 885-889 |
| NRP33 | |
| rice globulin | Wu et al. (1998) Plant Cell Physiol 39(8) 885-889 |
| Glb-1 | |
| rice globulin | Nakase et al. (1997) Plant Molec Biol 33: 513-522 |
| REB/OHP-1 | |
| rice ADP-glucose | Russell et al. (1997) Trans Res 6: 157-68 |
| pyrophosphorylase | |
| maize ESR | Opsahl-Ferstad et al. (1997) Plant J 12: 235-46 |
| gene family | |
| sorghum kafirin | DeRose et al. (1996) Plant Mol Biol 32: 1029-35 |

TABLE 2e
Examples of embryo specific promoters:

| Gene source | Reference |
|---|---|
| rice OSH1 | Sato et al, Proc. Natl. Acad. Sci. USA, 93: 8117-8122, |
| | 1996 |
| KNOX | Postma-Haarsma et al, Plant Mol. Biol. 39: 257-71, 1999 |
| PRO0151 | WO 2004/070039 |
| PRO0175 | WO 2004/070039 |
| PRO005 | WO 2004/070039 |
| PRO0095 | WO 2004/070039 |

TABLE 2f
Examples of aleurone-specific promoters:

| Gene source | Reference |
|---|---|
| α-amylase | Lanahan et al, Plant Cell 4: 203-211, 1992; |
| (Amy32b) | Skriver et al, Proc Natl Acad Sci USA 88: |
| | 7266-7270, 1991 |
| cathepsin β-like gene | Cejudo et al, Plant Mol Biol 20: 849-856, 1992 |
| Barley Ltp2 | Kalla et al., Plant J. 6: 849-60, 1994 |
| Chi26 | Leah et al., Plant J. 4: 579-89, 1994 |
| Maize B-Peru | Selinger et al., Genetics 149; 1125-38, 1998 |

[0508] A “green tissue-specific promoter” as defined herein is a promoter that is transcriptionally active predominantly in green tissue, substantially to the exclusion of any other parts of a plant, whilst still allowing for any leaky expression in these other plant parts.

[0509] Examples of green tissue-specific promoters which may be used to perform the methods of the invention are shown in Table 2g below.

TABLE 2g
Examples of green tissue-specific promoters

| Gene | Expression | Reference |
|---|---|---|
| Maize | Leaf specific | Fukavama et al., Plant Physiol. |
| Orthophosphate | | 2001 November; 127(3): 1136-46 |
| dikinase | | |
| Maize | Leaf specific | Kausch et al., Plant Mol Biol. |
| Phosphoenol- | | 2001 January; 45(1): 1-15 |
| pyruvate | | |
| carboxylase | | |
| Rice | Leaf specific | Lin et al., 2004 DNA Seq. 2004 |
| Phosphoenol- | | August; 15(4): 269-76 |
| pyruvate | | |
| carboxylase | | |
| Rice small | Leaf specific | Nomura et al., Plant Mol Biol. |
| subunit Rubisco | | 2000 September; 44(1): 99-106 |
| rice beta | Shoot specific | WO 2004/070039 |
| expansin EXBP9 | | |
| Pigeonpea small | Leaf specific | Panguluri et al., Indian J Exp |
| subunit Rubisco | | Biol. 2005 April; 43(4): 369-72 |
| Pea RBCS3A | Leaf specific | |

[0510] Another example of a tissue-specific promoter is a meristem-specific promoter, which is transcriptionally active predominantly in meristematic tissue, substantially to the exclusion of any other parts of a plant, whilst still allowing for any leaky expression in these other plant parts. Examples of green meristem-specific promoters which may be used to perform the methods of the invention are shown in Table 2h below.

TABLE 2h
Examples of meristem-specific promoters

| Gene source | Expression pattern | Reference |
|---|---|---|
| rice OSH1 | Shoot apical meristem, | Sato et al. (1996) |
| | from embryo globular | Proc. Natl. Acad. Sci. |
| | stage to seedling stage | USA, 93: 8117-8122 |
| Rice metallothionein | Meristem specific | BAD87835.1 |
| WAK1 & WAK 2 | Shoot and root apical | Wagner & Kohorn |
| | meristems, and in ex- | (2001) Plant Cell |
| | panding leaves and sepals | 13(2): 303-318 |

[0511] Terminator

[0512] The term “terminator” encompasses a control sequence which is a DNA sequence at the end of a transcriptional unit which signals 3′ processing and polyadenylation of a primary transcript and termination of transcription. The terminator can be derived from the natural gene, from a variety of other plant genes, or from T-DNA. The terminator to be added may be derived from, for example, the nopaline synthase or octopine synthase genes, or alternatively from another plant gene, or less preferably from any other eukaryotic gene.

[0513] Selectable Marker (Gene)/Reporter Gene

[0514] “Selectable marker”, “selectable marker gene” or “reporter gene” includes any gene that confers a phenotype on a cell in which it is expressed to facilitate the identification and/or selection of cells that are transfected or transformed with a nucleic acid construct of the invention. These marker genes enable the identification of a successful transfer of the nucleic acid molecules via a series of different principles. Suitable markers may be selected from markers that confer antibiotic or herbicide resistance, that introduce a new metabolic trait or that allow visual selection. Examples of selectable marker genes include genes conferring resistance to antibiotics (such as nptll that phosphorylates neomycin and kanamycin, or hpt, phosphorylating hygromycin, or genes conferring resistance to, for example, bleomycin, streptomycin, tetracyclin, chloramphenicol, ampicillin, gentamycin, geneticin (G418), spectinomycin or blasticidin), to herbicides (for example bar which provides resistance to Basta®; aroA or gox providing resistance against glyphosate, or the genes conferring resistance to, for example, imidazolinone, phosphinothricin or sulfonylurea), or genes that provide a metabolic trait (such as manA that allows plants to use mannose as sole carbon source or xylose isomerase for the utilisation of xylose, or antinutritive markers such as the resistance to 2-deoxyglucose). Expression of visual marker genes results in the formation of colour (for example β-glucuronidase, GUS or β-galactosidase with its coloured substrates, for example X-Gal), luminescence (such as the luciferin/luceferase system) or fluorescence (Green Fluorescent Protein, GFP, and derivatives thereof). This list represents only a small number of possible markers. The skilled worker is familiar with such markers. Different markers are preferred, depending on the organism and the selection method.

[0515] It is known that upon stable or transient integration of nucleic acids into plant cells, only a minority of the cells takes up the foreign DNA and, if desired, integrates it into its genome, depending on the expression vector used and the transfection technique used. To identify and select these integrants, a gene coding for a selectable marker (such as the ones described above) is usually introduced into the host cells together with the gene of interest. These markers can for example be used in mutants in which these genes are not functional by, for example, deletion by conventional methods. Furthermore, nucleic acid molecules encoding a selectable marker can be introduced into a host cell on the same vector that comprises the sequence encoding the polypeptides of the invention or used in the methods of the invention, or else in a separate vector. Cells which have been stably transfected with the introduced nucleic acid can be identified for example by selection (for example, cells which have integrated the selectable marker survive whereas the other cells die).

[0516] Since the marker genes, particularly genes for resistance to antibiotics and herbicides, are no longer required or are undesired in the transgenic host cell once the nucleic acids have been introduced successfully, the process according to the invention for introducing the nucleic acids advantageously employs techniques which enable the removal or excision of these marker genes. One such a method is what is known as co-transformation. The co-transformation method employs two vectors simultaneously for the transformation, one vector bearing the nucleic acid according to the invention and a second bearing the marker gene(s). A large proportion of transformants receives or, in the case of plants, comprises (up to 40% or more of the transformants), both vectors. In case of transformation with Agrobacteria, the transformants usually receive only a part of the vector, i.e. the sequence flanked by the T-DNA, which usually represents the expression cassette. The marker genes can subsequently be removed from the transformed plant by performing crosses. In another method, marker genes integrated into a transposon are used for the transformation together with desired nucleic acid (known as the Ac/Ds technology). The transformants can be crossed with a transposase source or the transformants are transformed with a nucleic acid construct conferring expression of a transposase, transiently or stable. In some cases (approx. 10%), the transposon jumps out of the genome of the host cell once transformation has taken place successfully and is lost. In a further number of cases, the transposon jumps to a different location. In these cases the marker gene must be eliminated by performing crosses. In microbiology, techniques were developed which make possible, or facilitate, the detection of such events. A further advantageous method relies on what is known as recombination systems; whose advantage is that elimination by crossing can be dispensed with. The best-known system of this type is what is known as the Cre/lox system. Crel is a recombinase that removes the sequences located between the loxP sequences. If the marker gene is integrated between the loxP sequences, it is removed once transformation has taken place successfully, by expression of the recombinase. Further recombination systems are the HIN/HIX, FLP/FRT and REP/STB system (Tribble et al., J. Biol. Chem., 275, 2000: 22255-22267; Velmurugan et al., J. Cell Biol., 149, 2000: 553-566). A site-specific integration into the plant genome of the nucleic acid sequences according to the invention is possible. Naturally, these methods can also be applied to microorganisms such as yeast, fungi or bacteria.

[0517] Transgenic/Transgene/Recombinant

[0518] For the purposes of the invention, “transgenic”, “transgene” or “recombinant” means with regard to, for example, a nucleic acid sequence, an expression cassette, gene construct or a vector comprising the nucleic acid sequence or an organism transformed with the nucleic acid sequences, expression cassettes or vectors according to the invention, all those constructions brought about by recombinant methods in which either
[0519] (a) the nucleic acid sequences encoding proteins useful in the methods of the invention, or
[0520] (b) genetic control sequence(s) which is operably linked with the nucleic acid sequence according to the invention, for example a promoter, or
[0521] (c) a) and b)

[0522] are not located in their natural genetic environment or have been modified by recombinant methods, it being possible for the modification to take the form of, for example, a substitution, addition, deletion, inversion or insertion of one or more nucleotide residues. The natural genetic environment is understood as meaning the natural genomic or chromosomal locus in the original plant or the presence in a genomic library. In the case of a genomic library, the natural genetic environment of the nucleic acid sequence is preferably retained, at least in part. The environment flanks the nucleic acid sequence at least on one side and has a sequence length of at least 50 bp, preferably at least 500 bp, especially preferably at least 1000 bp, most preferably at least 5000 bp. A naturally occurring expression cassette—for example the naturally occurring combination of the natural promoter of the nucleic acid sequences with the corresponding nucleic acid sequence encoding a polypeptide useful in the methods of the present invention, as defined above—becomes a transgenic expression cassette when this expression cassette is modified by non-natural, synthetic (“artificial”) methods such as, for example, mutagenic treatment. Suitable methods are described, for example, in U.S. Pat. No. 5,565,350 or WO 00/15815.

[0523] A transgenic plant for the purposes of the invention is thus understood as meaning, as above, that the nucleic acids used in the method of the invention are not present in, or originating from, the genome of said plant, or are present in the genome of said plant but not at their natural locus in the genome of said plant, it being possible for the nucleic acids to be expressed homologously or heterologously. However, as mentioned, transgenic also means that, while the nucleic acids according to the invention or used in the inventive method are at their natural position in the genome of a plant, the sequence has been modified with regard to the natural sequence, and/or that the regulatory sequences of the natural sequences have been modified. Transgenic is preferably understood as meaning the expression of the nucleic acids according to the invention at an unnatural locus in the genome, i.e. homologous or, preferably, heterologous expression of the nucleic acids takes place. Preferred transgenic plants are mentioned herein.

[0524] It shall further be noted that in the context of the present invention, the term “isolated nucleic acid” or “isolated polypeptide” may in some instances be considered as a synonym for a “recombinant nucleic acid” or a “recombinant polypeptide”, respectively and refers to a nucleic acid or polypeptide that is not located in its natural genetic environment and/or that has been modified by recombinant methods.

[0525] Modulation

[0526] The term “modulation” means in relation to expression or gene expression, a process in which the expression level is changed by said gene expression in comparison to the control plant, the expression level may be increased or decreased. The original, unmodulated expression may be of any kind of expression of a structural RNA (rRNA, tRNA) or mRNA with subsequent translation. For the purposes of this invention, the original unmodulated expression may also be absence of any expression. The term “modulating the activity” shall mean any change of the expression of the inventive nucleic acid sequences or encoded proteins, which leads to increased yield and/or increased growth of the plants. The expression can increase from zero (absence of, or immeasurable expression) to a certain amount, or can decrease from a certain amount to immeasurable small amounts or zero.

[0527] Expression

[0528] The term “expression” or “gene expression” means the transcription of a specific gene or specific genes or specific genetic construct. The term “expression” or “gene expression” in particular means the transcription of a gene or genes or genetic construct into structural RNA (rRNA, tRNA) or mRNA with or without subsequent translation of the latter into a protein. The process includes transcription of DNA and processing of the resulting mRNA product.

[0529] Increased Expression/Overexpression

[0530] The term “increased expression” or “overexpression” as used herein means any form of expression that is additional to the original wild-type expression level. For the purposes of this invention, the original wild-type expression level might also be zero, i.e. absence of expression or immeasurable expression.

[0531] Methods for increasing expression of genes or gene products are well documented in the art and include, for example, overexpression driven by appropriate promoters, the use of transcription enhancers or translation enhancers. Isolated nucleic acids which serve as promoter or enhancer elements may be introduced in an appropriate position (typically upstream) of a non-heterologous form of a polynucleotide so as to upregulate expression of a nucleic acid encoding the polypeptide of interest. For example, endogenous promoters may be altered in vivo by mutation, deletion, and/or substitution (see, Kmiec, U.S. Pat. No. 5,565,350; Zarling et al., WO9322443), or isolated promoters may be introduced into a plant cell in the proper orientation and distance from a gene of the present invention so as to control the expression of the gene.

[0532] If polypeptide expression is desired, it is generally desirable to include a polyadenylation region at the 3′-end of a polynucleotide coding region. The polyadenylation region can be derived from the natural gene, from a variety of other plant genes, or from T-DNA. The 3′ end sequence to be added may be derived from, for example, the nopaline synthase or octopine synthase genes, or alternatively from another plant gene, or less preferably from any other eukaryotic gene.

[0533] An intron sequence may also be added to the 5′ untranslated region (UTR) or the coding sequence of the partial coding sequence to increase the amount of the mature message that accumulates in the cytosol. Inclusion of a spliceable intron in the transcription unit in both plant and animal expression constructs has been shown to increase gene expression at both the mRNA and protein levels up to 1000-fold (Buchman and Berg (1988) Mol. Cell biol. 8: 4395-4405; Callis et al. (1987) Genes Dev 1:1183-1200). Such intron enhancement of gene expression is typically greatest when placed near the 5′ end of the transcription unit. Use of the maize introns Adhl-S intron 1, 2, and 6, the Bronze-1 intron are known in the art. For general information see: The Maize Handbook, Chapter 116, Freeling and Walbot, Eds., Springer, N.Y. (1994).

[0534] Decreased Expression

[0535] Reference herein to “decreased expression” or “reduction or substantial elimination” of expression is taken to mean a decrease in endogenous gene expression and/or polypeptide levels and/or polypeptide activity relative to control plants. The reduction or substantial elimination is in increasing order of preference at least 10%, 20%, 30%, 40% or 50%, 60%, 70%, 80%, 85%, 90%, or 95%, 96%, 97%, 98%, 99% or more reduced compared to that of control plants.

[0536] For the reduction or substantial elimination of expression an endogenous gene in a plant, a sufficient length of substantially contiguous nucleotides of a nucleic acid sequence is required. In order to perform gene silencing, this may be as little as 20, 19, 18, 17, 16, 15, 14, 13, 12, 11, 10 or fewer nucleotides, alternatively this may be as much as the entire gene (including the 5′ and/or 3′ UTR, either in part or in whole). The stretch of substantially contiguous nucleotides may be derived from the nucleic acid encoding the protein of interest (target gene), or from any nucleic acid capable of encoding an orthologue, paralogue or homologue of the protein of interest. Preferably, the stretch of substantially contiguous nucleotides is capable of forming hydrogen bonds with the target gene (either sense or antisense strand), more preferably, the stretch of substantially contiguous nucleotides has, in increasing order of preference, 50%, 60%, 70%, 80%, 85%, 90%, 95%, 96%, 97%, 98%, 99%, 100% sequence identity to the target gene (either sense or antisense strand). A nucleic acid sequence encoding a (functional) polypeptide is not a requirement for the various methods discussed herein for the reduction or substantial elimination of expression of an endogenous gene.

[0537] This reduction or substantial elimination of expression may be achieved using routine tools and techniques. A preferred method for the reduction or substantial elimination of endogenous gene expression is by introducing and expressing in a plant a genetic construct into which the nucleic acid (in this case a stretch of substantially contiguous nucleotides derived from the gene of interest, or from any nucleic acid capable of encoding an orthologue, paralogue or homologue of any one of the protein of interest) is cloned as an inverted repeat (in part or completely), separated by a spacer (non-coding DNA).

[0538] In such a preferred method, expression of the endogenous gene is reduced or substantially eliminated through RNA-mediated silencing using an inverted repeat of a nucleic acid or a part thereof (in this case a stretch of substantially contiguous nucleotides derived from the gene of interest, or from any nucleic acid capable of encoding an orthologue, paralogue or homologue of the protein of interest), preferably capable of forming a hairpin structure. The inverted repeat is cloned in an expression vector comprising control sequences. A non-coding DNA nucleic acid sequence (a spacer, for example a matrix attachment region fragment (MAR), an intron, a polylinker, etc.) is located between the two inverted nucleic acids forming the inverted repeat. After transcription of the inverted repeat, a chimeric RNA with a self-complementary structure is formed (partial or complete). This double-stranded RNA structure is referred to as the hairpin RNA (hpRNA). The hpRNA is processed by the plant into siRNAs that are incorporated into an RNA-induced silencing complex (RISC). The RISC further cleaves the mRNA transcripts, thereby substantially reducing the number of mRNA transcripts to be translated into polypeptides. For further general details see for example, Grierson et al. (1998) WO 98/53083; Waterhouse et al. (1999) WO 99/53050).

[0539] Performance of the methods of the invention does not rely on introducing and expressing in a plant a genetic construct into which the nucleic acid is cloned as an inverted repeat, but any one or more of several well-known “gene silencing” methods may be used to achieve the same effects.

[0540] One such method for the reduction of endogenous gene expression is RNA-mediated silencing of gene expression (downregulation). Silencing in this case is triggered in a plant by a double stranded RNA sequence (dsRNA) that is substantially similar to the target endogenous gene. This dsRNA is further processed by the plant into about 20 to about 26 nucleotides called short interfering RNAs (siRNAs). The siRNAs are incorporated into an RNA-induced silencing complex (RISC) that cleaves the mRNA transcript of the endogenous target gene, thereby substantially reducing the number of mRNA transcripts to be translated into a polypeptide. Preferably, the double stranded RNA sequence corresponds to a target gene.

[0541] Another example of an RNA silencing method involves the introduction of nucleic acid sequences or parts thereof (in this case a stretch of substantially contiguous nucleotides derived from the gene of interest, or from any nucleic acid capable of encoding an orthologue, paralogue or homologue of the protein of interest) in a sense orientation into a plant. “Sense orientation” refers to a DNA sequence that is homologous to an mRNA transcript thereof. Introduced into a plant would therefore be at least one copy of the nucleic acid sequence. The additional nucleic acid sequence will reduce expression of the endogenous gene, giving rise to a phenomenon known as co-suppression. The reduction of gene expression will be more pronounced if several additional copies of a nucleic acid sequence are introduced into the plant, as there is a positive correlation between high transcript levels and the triggering of co-suppression.

[0542] Another example of an RNA silencing method involves the use of antisense nucleic acid sequences. An “antisense” nucleic acid sequence comprises a nucleotide sequence that is complementary to a “sense” nucleic acid sequence encoding a protein, i.e. complementary to the coding strand of a double-stranded cDNA molecule or complementary to an mRNA transcript sequence. The antisense nucleic acid sequence is preferably complementary to the endogenous gene to be silenced. The complementarity may be located in the “coding region” and/or in the “non-coding region” of a gene. The term “coding region” refers to a region of the nucleotide sequence comprising codons that are translated into amino acid residues. The term “non-coding region” refers to 5′ and 3′ sequences that flank the coding region that are transcribed but not translated into amino acids (also referred to as 5′ and 3′ untranslated regions).

[0543] Antisense nucleic acid sequences can be designed according to the rules of Watson and Crick base pairing. The antisense nucleic acid sequence may be complementary to the entire nucleic acid sequence (in this case a stretch of substantially contiguous nucleotides derived from the gene of interest, or from any nucleic acid capable of encoding an orthologue, paralogue or homologue of the protein of interest), but may also be an oligonucleotide that is antisense to only a part of the nucleic acid sequence (including the mRNA 5′ and 3′ UTR). For example, the antisense oligonucleotide sequence may be complementary to the region surrounding the translation start site of an mRNA transcript encoding a polypeptide. The length of a suitable antisense oligonucleotide sequence is known in the art and may start from about 50, 45, 40, 35, 30, 25, 20, 15 or 10 nucleotides in length or less. An antisense nucleic acid sequence according to the invention may be constructed using chemical synthesis and enzymatic ligation reactions using methods known in the art. For example, an antisense nucleic acid sequence (e.g., an antisense oligonucleotide sequence) may be chemically synthesized using naturally occurring nucleotides or variously modified nucleotides designed to increase the biological stability of the molecules or to increase the physical stability of the duplex formed between the antisense and sense nucleic acid sequences, e.g., phosphorothioate derivatives and acridine substituted nucleotides may be used. Examples of modified nucleotides that may be used to generate the antisense nucleic acid sequences are well known in the art. Known nucleotide modifications include methylation, cyclization and ‘caps’ and substitution of one or more of the naturally occurring nucleotides with an analogue such as inosine. Other modifications of nucleotides are well known in the art.

[0544] The antisense nucleic acid sequence can be produced biologically using an expression vector into which a nucleic acid sequence has been subcloned in an antisense orientation (i.e., RNA transcribed from the inserted nucleic acid will be of an antisense orientation to a target nucleic acid of interest). Preferably, production of antisense nucleic acid sequences in plants occurs by means of a stably integrated nucleic acid construct comprising a promoter, an operably linked antisense oligonucleotide, and a terminator.

[0545] The nucleic acid molecules used for silencing in the methods of the invention (whether introduced into a plant or generated in situ) hybridize with or bind to mRNA transcripts and/or genomic DNA encoding a polypeptide to thereby inhibit expression of the protein, e.g., by inhibiting transcription and/or translation. The hybridization can be by conventional nucleotide complementarity to form a stable duplex, or, for example, in the case of an antisense nucleic acid sequence which binds to DNA duplexes, through specific interactions in the major groove of the double helix. Antisense nucleic acid sequences may be introduced into a plant by transformation or direct injection at a specific tissue site. Alternatively, antisense nucleic acid sequences can be modified to target selected cells and then administered systemically. For example, for systemic administration, antisense nucleic acid sequences can be modified such that they specifically bind to receptors or antigens expressed on a selected cell surface, e.g., by linking the antisense nucleic acid sequence to peptides or antibodies which bind to cell surface receptors or antigens. The antisense nucleic acid sequences can also be delivered to cells using the vectors described herein.

[0546] According to a further aspect, the antisense nucleic acid sequence is an a-anomeric nucleic acid sequence. An a-anomeric nucleic acid sequence forms specific double-stranded hybrids with complementary RNA in which, contrary to the usual b-units, the strands run parallel to each other (Gaultier et al. (1987) Nucl Ac Res 15: 6625-6641). The antisense nucleic acid sequence may also comprise a 2′-o-methylribonucleotide (Inoue et al. (1987) Nucl Ac Res 15, 6131-6148) or a chimeric RNA-DNA analogue (Inoue et al. (1987) FEBS Lett. 215, 327-330).

[0547] The reduction or substantial elimination of endogenous gene expression may also be performed using ribozymes. Ribozymes are catalytic RNA molecules with ribonuclease activity that are capable of cleaving a single-stranded nucleic acid sequence, such as an mRNA, to which they have a complementary region. Thus, ribozymes (e.g., hammerhead ribozymes (described in Haselhoff and Gerlach (1988) Nature 334, 585-591) can be used to catalytically cleave mRNA transcripts encoding a polypeptide, thereby substantially reducing the number of mRNA transcripts to be translated into a polypeptide. A ribozyme having specificity for a nucleic acid sequence can be designed (see for example: Cech et al. U.S. Pat. No. 4,987,071; and Cech et al. U.S. Pat. No. 5,116,742). Alternatively, mRNA transcripts corresponding to a nucleic acid sequence can be used to select a catalytic RNA having a specific ribonuclease activity from a pool of RNA molecules (Bartel and Szostak (1993) Science 261, 1411-1418). The use of ribozymes for gene silencing in plants is known in the art (e.g., Atkins et al. (1994) WO 94/00012; Lenne et al. (1995) WO 95/03404; Lutziger et al. (2000) WO 00/00619; Prinsen et al. (1997) WO 97/13865 and Scott et al. (1997) WO 97/38116).

[0548] Gene silencing may also be achieved by insertion mutagenesis (for example, T-DNA insertion or transposon insertion) or by strategies as described by, among others, Angell and Baulcombe ((1999) Plant J 20(3): 357-62), (Amplicon VIGS WO 98/36083), or Baulcombe (WO 99/15682).

[0549] Gene silencing may also occur if there is a mutation on an endogenous gene and/or a mutation on an isolated gene/nucleic acid subsequently introduced into a plant. The reduction or substantial elimination may be caused by a non-functional polypeptide. For example, the polypeptide may bind to various interacting proteins; one or more mutation(s) and/or truncation(s) may therefore provide for a polypeptide that is still able to bind interacting proteins (such as receptor proteins) but that cannot exhibit its normal function (such as signalling ligand).

[0550] A further approach to gene silencing is by targeting nucleic acid sequences complementary to the regulatory region of the gene (e.g., the promoter and/or enhancers) to form triple helical structures that prevent transcription of the gene in target cells. See Helene, C., Anticancer Drug Res. 6, 569-84, 1991; Helene et al., Ann. N.Y. Acad. Sci. 660, 27-36 1992; and Maher, L. J. Bioassays 14, 807-15, 1992.

[0551] Other methods, such as the use of antibodies directed to an endogenous polypeptide for inhibiting its function in planta, or interference in the signalling pathway in which a polypeptide is involved, will be well known to the skilled man. In particular, it can be envisaged that manmade molecules may be useful for inhibiting the biological function of a target polypeptide, or for interfering with the signalling pathway in which the target polypeptide is involved.

[0552] Alternatively, a screening program may be set up to identify in a plant population natural variants of a gene, which variants encode polypeptides with reduced activity. Such natural variants may also be used for example, to perform homologous recombination.

[0553] Artificial and/or natural microRNAs (miRNAs) may be used to knock out gene expression and/or mRNA translation. Endogenous miRNAs are single stranded small RNAs of typically 19-24 nucleotides long. They function primarily to regulate gene expression and/or mRNA translation. Most plant microRNAs (miRNAs) have perfect or near-perfect complementarity with their target sequences. However, there are natural targets with up to five mismatches. They are processed from longer non-coding RNAs with characteristic fold-back structures by double-strand specific RNases of the Dicer family. Upon processing, they are incorporated in the RNA-induced silencing complex (RISC) by binding to its main component, an Argonaute protein. MiRNAs serve as the specificity components of RISC, since they base-pair to target nucleic acids, mostly mRNAs, in the cytoplasm. Subsequent regulatory events include target mRNA cleavage and destruction and/or translational inhibition. Effects of miRNA overexpression are thus often reflected in decreased mRNA levels of target genes.

[0554] Artificial microRNAs (amiRNAs), which are typically 21 nucleotides in length, can be genetically engineered specifically to negatively regulate gene expression of single or multiple genes of interest. Determinants of plant microRNA target selection are well known in the art. Empirical parameters for target recognition have been defined and can be used to aid in the design of specific amiRNAs, (Schwab et al., Dev. Cell 8, 517-527, 2005). Convenient tools for design and generation of amiRNAs and their precursors are also available to the public (Schwab et al., Plant Cell 18, 1121-1133, 2006).

[0555] For optimal performance, the gene silencing techniques used for reducing expression in a plant of an endogenous gene requires the use of nucleic acid sequences from monocotyledonous plants for transformation of monocotyledonous plants, and from dicotyledonous plants for transformation of dicotyledonous plants. Preferably, a nucleic acid sequence from any given plant species is introduced into that same species. For example, a nucleic acid sequence from rice is transformed into a rice plant. However, it is not an absolute requirement that the nucleic acid sequence to be introduced originates from the same plant species as the plant in which it will be introduced. It is sufficient that there is substantial homology between the endogenous target gene and the nucleic acid to be introduced.

[0556] Described above are examples of various methods for the reduction or substantial elimination of expression in a plant of an endogenous gene. A person skilled in the art would readily be able to adapt the aforementioned methods for silencing so as to achieve reduction of expression of an endogenous gene in a whole plant or in parts thereof through the use of an appropriate promoter, for example.

[0557] Transformation

[0558] The term “introduction” or “transformation” as referred to herein encompasses the transfer of an exogenous polynucleotide into a host cell, irrespective of the method used for transfer. Plant tissue capable of subsequent clonal propagation, whether by organogenesis or embryogenesis, may be transformed with a genetic construct of the present invention and a whole plant regenerated there from. The particular tissue chosen will vary depending on the clonal propagation systems available for, and best suited to, the particular species being transformed. Exemplary tissue targets include leaf disks, pollen, embryos, cotyledons, hypocotyls, megagametophytes, callus tissue, existing meristematic tissue (e.g., apical meristem, axillary buds, and root meristems), and induced meristem tissue (e.g., cotyledon meristem and hypocotyl meristem). The polynucleotide may be transiently or stably introduced into a host cell and may be maintained non-integrated, for example, as a plasmid. Alternatively, it may be integrated into the host genome. The resulting transformed plant cell may then be used to regenerate a transformed plant in a manner known to persons skilled in the art. Alternatively, a plant cell that cannot be regenerated into a plant may be chosen as host cell, i.e. the resulting transformed plant cell does not have the capacity to regenerate into a (whole) plant.

[0559] The transfer of foreign genes into the genome of a plant is called transformation. Transformation of plant species is now a fairly routine technique. Advantageously, any of several transformation methods may be used to introduce the gene of interest into a suitable ancestor cell. The methods described for the transformation and regeneration of plants from plant tissues or plant cells may be utilized for transient or for stable transformation. Transformation methods include the use of liposomes, electroporation, chemicals that increase free DNA uptake, injection of the DNA directly into the plant, particle gun bombardment, transformation using viruses or pollen and microprojection. Methods may be selected from the calcium/polyethylene glycol method for protoplasts (Krens, F. A. et al., (1982) Nature 296, 72-74; Negrutiu I et al. (1987) Plant Mol Biol 8: 363-373); electroporation of protoplasts (Shillito R. D. et al. (1985) Bio/Technol 3, 1099-1102); microinjection into plant material (Crossway A et al., (1986) Mol. Gen Genet 202: 179-185); DNA or RNA-coated particle bombardment (Klein T M et al., (1987) Nature 327: 70) infection with (non-integrative) viruses and the like. Transgenic plants, including transgenic crop plants, are preferably produced via Agrobacterium-mediated transformation. An advantageous transformation method is the transformation in planta. To this end, it is possible, for example, to allow the agrobacteria to act on plant seeds or to inoculate the plant meristem with agrobacteria. It has proved particularly expedient in accordance with the invention to allow a suspension of transformed agrobacteria to act on the intact plant or at least on the flower primordia. The plant is subsequently grown on until the seeds of the treated plant are obtained (Clough and Bent, Plant J. (1998) 16, 735-743). Methods for Agrobacterium-mediated transformation of rice include well known methods for rice transformation, such as those described in any of the following: European patent application EP 1198985 A1, Aldemita and Hodges (Planta 199: 612-617, 1996); Chan et al. (Plant Mol Biol 22 (3): 491-506, 1993), Hiei et al. (Plant J 6 (2): 271-282, 1994), which disclosures are incorporated by reference herein as if fully set forth. In the case of corn transformation, the preferred method is as described in either Ishida et al. (Nat. Biotechnol 14(6): 745-50, 1996) or Frame et al. (Plant Physiol 129(1): 13-22, 2002), which disclosures are incorporated by reference herein as if fully set forth. Said methods are further described by way of example in B. Jenes et al., Techniques for Gene Transfer, in: Transgenic Plants, Vol. 1, Engineering and Utilization, eds. S. D. Kung and R. Wu, Academic Press (1993) 128-143 and in Potrykus Annu. Rev. Plant Physiol. Plant Molec. Biol. 42 (1991) 205-225). The nucleic acids or the construct to be expressed is preferably cloned into a vector, which is suitable for transforming Agrobacterium tumefaciens, for example pBin19 (Bevan et al., Nucl. Acids Res. 12 (1984) 8711). Agrobacteria transformed by such a vector can then be used in known manner for the transformation of plants, such as plants used as a model, like Arabidopsis (Arabidopsis thaliana is within the scope of the present invention not considered as a crop plant), or crop plants such as, by way of example, tobacco plants, for example by immersing bruised leaves or chopped leaves in an agrobacterial solution and then culturing them in suitable media. The transformation of plants by means of Agrobacterium tumefaciens is described, for example, by Hofgen and Willmitzer in Nucl. Acid Res. (1988) 16, 9877 or is known inter alia from F. F. White, Vectors for Gene Transfer in Higher Plants; in Transgenic Plants, Vol. 1, Engineering and Utilization, eds. S. D. Kung and R. Wu, Academic Press, 1993, pp. 15-38.

[0560] In addition to the transformation of somatic cells, which then have to be regenerated into intact plants, it is also possible to transform the cells of plant meristems and in particular those cells which develop into gametes. In this case, the transformed gametes follow the natural plant development, giving rise to transgenic plants. Thus, for example, seeds of Arabidopsis are treated with agrobacteria and seeds are obtained from the developing plants of which a certain proportion is transformed and thus transgenic [Feldman, K A and Marks M D (1987). Mol Gen Genet 208:1-9; Feldmann K (1992). In: C Koncz, N-H Chua and J Shell, eds, Methods in Arabidopsis Research. Word Scientific, Singapore, pp. 274-289]. Alternative methods are based on the repeated removal of the inflorescences and incubation of the excision site in the center of the rosette with transformed agrobacteria, whereby transformed seeds can likewise be obtained at a later point in time (Chang (1994). Plant J. 5: 551-558; Katavic (1994). Mol Gen Genet, 245: 363-370). However, an especially effective method is the vacuum infiltration method with its modifications such as the “floral dip” method. In the case of vacuum infiltration of Arabidopsis, intact plants under reduced pressure are treated with an agrobacterial suspension [Bechthold, N (1993). C R Acad Sci Paris Life Sci, 316: 1194-1199], while in the case of the “floral dip” method the developing floral tissue is incubated briefly with a surfactant-treated agrobacterial suspension [Clough, S J and Bent A F (1998) The Plant J. 16, 735-743]. A certain proportion of transgenic seeds are harvested in both cases, and these seeds can be distinguished from non-transgenic seeds by growing under the above-described selective conditions. In addition the stable transformation of plastids is of advantages because plastids are inherited maternally is most crops reducing or eliminating the risk of transgene flow through pollen. The transformation of the chloroplast genome is generally achieved by a process which has been schematically displayed in Klaus et al., 2004 [Nature Biotechnology 22 (2), 225-229]. Briefly the sequences to be transformed are cloned together with a selectable marker gene between flanking sequences homologous to the chloroplast genome. These homologous flanking sequences direct site specific integration into the plastome. Plastidal transformation has been described for many different plant species and an overview is given in Bock (2001) Transgenic plastids in basic research and plant biotechnology. J Mol Biol. 2001 Sep. 21; 312 (3):425-38 or Maliga, P (2003) Progress towards commercialization of plastid transformation technology. Trends Biotechnol. 21, 20-28. Further biotechnological progress has recently been reported in form of marker free plastid transformants, which can be produced by a transient co-integrated maker gene (Klaus et al., 2004, Nature Biotechnology 22(2), 225-229).

[0561] The genetically modified plant cells can be regenerated via all methods with which the skilled worker is familiar. Suitable methods can be found in the abovementioned publications by S. D. Kung and R. Wu, Potrykus or Hofgen and Willmitzer. Alternatively, the genetically modified plant cells are non-regenerable into a whole plant.

[0562] Generally after transformation, plant cells or cell groupings are selected for the presence of one or more markers which are encoded by plant-expressible genes co-transferred with the gene of interest, following which the transformed material is regenerated into a whole plant. To select transformed plants, the plant material obtained in the transformation is, as a rule, subjected to selective conditions so that transformed plants can be distinguished from untransformed plants. For example, the seeds obtained in the above-described manner can be planted and, after an initial growing period, subjected to a suitable selection by spraying. A further possibility consists in growing the seeds, if appropriate after sterilization, on agar plates using a suitable selection agent so that only the transformed seeds can grow into plants. Alternatively, the transformed plants are screened for the presence of a selectable marker such as the ones described above.

[0563] Following DNA transfer and regeneration, putatively transformed plants may also be evaluated, for instance using Southern analysis, for the presence of the gene of interest, copy number and/or genomic organisation. Alternatively or additionally, expression levels of the newly introduced DNA may be monitored using Northern and/or Western analysis, both techniques being well known to persons having ordinary skill in the art.

[0564] The generated transformed plants may be propagated by a variety of means, such as by clonal propagation or classical breeding techniques. For example, a first generation (or T1) transformed plant may be selfed and homozygous second-generation (or T2) transformants selected, and the T2 plants may then further be propagated through classical breeding techniques. The generated transformed organisms may take a variety of forms. For example, they may be chimeras of transformed cells and non-transformed cells; clonal transformants (e.g., all cells transformed to contain the expression cassette); grafts of transformed and untransformed tissues (e.g., in plants, a transformed rootstock grafted to an untransformed scion).

[0565] T-DNA Activation Tagging

[0566] “T-DNA activation” tagging (Hayashi et al. Science (1992) 1350-1353), involves insertion of T-DNA, usually containing a promoter (may also be a translation enhancer or an intron), in the genomic region of the gene of interest or 10 kb up- or downstream of the coding region of a gene in a configuration such that the promoter directs expression of the targeted gene. Typically, regulation of expression of the targeted gene by its natural promoter is disrupted and the gene falls under the control of the newly introduced promoter. The promoter is typically embedded in a T-DNA. This T-DNA is randomly inserted into the plant genome, for example, through Agrobacterium infection and leads to modified expression of genes near the inserted T-DNA. The resulting transgenic plants show dominant phenotypes due to modified expression of genes close to the introduced promoter.

[0567] Tilling

[0568] The term “TILLING” is an abbreviation of “Targeted Induced Local Lesions In Genomes” and refers to a mutagenesis technology useful to generate and/or identify nucleic acids encoding proteins with modified expression and/or activity. TILLING also allows selection of plants carrying such mutant variants. These mutant variants may exhibit modified expression, either in strength or in location or in timing (if the mutations affect the promoter for example). These mutant variants may exhibit higher activity than that exhibited by the gene in its natural form. TILLING combines high-density mutagenesis with high-throughput screening methods. The steps typically followed in TILLING are: (a) EMS mutagenesis (Redei G P and Koncz C (1992) In Methods in Arabidopsis Research, Koncz C, Chua N H, Schell J, eds. Singapore, World Scientific Publishing Co, pp. 16-82; Feldmann et al., (1994) In Meyerowitz E M, Somerville C R, eds, Arabidopsis. Cold Spring Harbor Laboratory Press, Cold Spring Harbor, N.Y., pp 137-172; Lightner J and Caspar T (1998) In J Martinez-Zapater, J Salinas, eds, Methods on Molecular Biology, Vol. 82. Humana Press, Totowa, N.J., pp 91-104); (b) DNA preparation and pooling of individuals; (c) PCR amplification of a region of interest; (d) denaturation and annealing to allow formation of heteroduplexes; (e) DHPLC, where the presence of a heteroduplex in a pool is detected as an extra peak in the chromatogram; (f) identification of the mutant individual; and (g) sequencing of the mutant PCR product. Methods for TILLING are well known in the art (McCallum et al., (2000) Nat Biotechnol 18: 455-457; reviewed by Stemple (2004) Nat Rev Genet 5(2): 145-50).

[0569] Homologous Recombination

[0570] “Homologous recombination” allows introduction in a genome of a selected nucleic acid at a defined selected position. Homologous recombination is a standard technology used routinely in biological sciences for lower organisms such as yeast or the moss Physcomitrella. Methods for performing homologous recombination in plants have been described not only for model plants (Offringa et al. (1990) EMBO J 9(10): 3077-84) but also for crop plants, for example rice (Terada et al. (2002) Nat Biotech 20(10): 1030-4; Lida and Terada (2004) Curr Opin Biotech 15(2): 132-8), and approaches exist that are generally applicable regardless of the target organism (Miller et al, Nature Biotechnol. 25, 778-785, 2007).

[0571] Yield Related Trait(s)

[0572] A “Yield related trait” is a trait or feature which is related to plant yield. Yield-related traits may comprise one or more of the following non-limitative list of features: early flowering time, yield, biomass, seed yield, early vigour, greenness index, growth rate, agronomic traits, such as e.g. tolerance to submergence (which leads to yield in rice), Water Use Efficiency (WUE), Nitrogen Use Efficiency (NUE), etc.

[0573] Reference herein to enhanced yield-related traits, relative to of control plants is taken to mean one or more of an increase in early vigour and/or in biomass (weight) of one or more parts of a plant, which may include (i) aboveground parts and preferably aboveground harvestable parts and/or (ii) parts below ground and preferably harvestable below ground. In particular, such harvestable parts are seeds.

[0574] Yield

[0575] The term “yield” in general means a measurable produce of economic value, typically related to a specified crop, to an area, and to a period of time. Individual plant parts directly contribute to yield based on their number, size and/or weight, or the actual yield is the yield per square meter for a crop and year, which is determined by dividing total production (includes both harvested and appraised production) by planted square meters.

[0576] The terms “yield” of a plant and “plant yield” are used interchangeably herein and are meant to refer to vegetative biomass such as root and/or shoot biomass, to reproductive organs, and/or to propagules such as seeds of that plant.

[0577] Flowers in maize are unisexual; male inflorescences (tassels) originate from the apical stem and female inflorescences (ears) arise from axillary bud apices. The female inflorescence produces pairs of spikelets on the surface of a central axis (cob). Each of the female spikelets encloses two fertile florets, one of them will usually mature into a maize kernel once fertilized. Hence a yield increase in maize may be manifested as one or more of the following: increase in the number of plants established per square meter, an increase in the number of ears per plant, an increase in the number of rows, number of kernels per row, kernel weight, thousand kernel weight, ear length/diameter, increase in the seed filling rate, which is the number of filled florets (i.e. florets containing seed) divided by the total number of florets and multiplied by 100), among others.

[0578] Inflorescences in rice plants are named panicles. The panicle bears spikelets, which are the basic units of the panicles, and which consist of a pedicel and a floret. The floret is borne on the pedicel and includes a flower that is covered by two protective glumes: a larger glume (the lemma) and a shorter glume (the palea). Hence, taking rice as an example, a yield increase may manifest itself as an increase in one or more of the following: number of plants per square meter, number of panicles per plant, panicle length, number of spikelets per panicle, number of flowers (or florets) per panicle; an increase in the seed filling rate which is the number of filled florets (i.e. florets containing seeds) divided by the total number of florets and multiplied by 100; an increase in thousand kernel weight, among others.

[0579] Early Flowering Time

[0580] Plants having an “early flowering time” as used herein are plants which start to flower earlier than control plants. Hence this term refers to plants that show an earlier start of flowering. Flowering time of plants can be assessed by counting the number of days (“time to flower”) between sowing and the emergence of a first inflorescence. The “flowering time” of a plant can for instance be determined using the method as described in WO 2007/093444.

[0581] Early Vigour

[0582] “Early vigour” refers to active healthy well-balanced growth especially during early stages of plant growth, and may result from increased plant fitness due to, for example, the plants being better adapted to their environment (i.e. optimizing the use of energy resources and partitioning between shoot and root). Plants having early vigour also show increased seedling survival and a better establishment of the crop, which often results in highly uniform fields (with the crop growing in uniform manner, i.e. with the majority of plants reaching the various stages of development at substantially the same time), and often better and higher yield. Therefore, early vigour may be determined by measuring various factors, such as thousand kernel weight, percentage germination, percentage emergence, seedling growth, seedling height, root length, root and shoot biomass and many more.

[0583] Increased Growth Rate

[0584] The increased growth rate may be specific to one or more parts of a plant (including seeds), or may be throughout substantially the whole plant. Plants having an increased growth rate may have a shorter life cycle. The life cycle of a plant may be taken to mean the time needed to grow from a mature seed up to the stage where the plant has produced mature seeds, similar to the starting material. This life cycle may be influenced by factors such as speed of germination, early vigour, growth rate, greenness index, flowering time and speed of seed maturation. The increase in growth rate may take place at one or more stages in the life cycle of a plant or during substantially the whole plant life cycle. Increased growth rate during the early stages in the life cycle of a plant may reflect enhanced vigour. The increase in growth rate may alter the harvest cycle of a plant allowing plants to be sown later and/or harvested sooner than would otherwise be possible (a similar effect may be obtained with earlier flowering time). If the growth rate is sufficiently increased, it may allow for the further sowing of seeds of the same plant species (for example sowing and harvesting of rice plants followed by sowing and harvesting of further rice plants all within one conventional growing period) Similarly, if the growth rate is sufficiently increased, it may allow for the further sowing of seeds of different plants species (for example the sowing and harvesting of corn plants followed by, for example, the sowing and optional harvesting of soybean, potato or any other suitable plant). Harvesting additional times from the same rootstock in the case of some crop plants may also be possible. Altering the harvest cycle of a plant may lead to an increase in annual biomass production per square meter (due to an increase in the number of times (say in a year) that any particular plant may be grown and harvested). An increase in growth rate may also allow for the cultivation of transgenic plants in a wider geographical area than their wild-type counterparts, since the territorial limitations for growing a crop are often determined by adverse environmental conditions either at the time of planting (early season) or at the time of harvesting (late season). Such adverse conditions may be avoided if the harvest cycle is shortened. The growth rate may be determined by deriving various parameters from growth curves, such parameters may be: T-Mid (the time taken for plants to reach 50% of their maximal size) and T-90 (time taken for plants to reach 90% of their maximal size), amongst others.

[0585] Stress Resistance

[0586] An increase in yield and/or growth rate occurs whether the plant is under non-stress conditions or whether the plant is exposed to various stresses compared to control plants. Plants typically respond to exposure to stress by growing more slowly. In conditions of severe stress, the plant may even stop growing altogether. Mild stress on the other hand is defined herein as being any stress to which a plant is exposed which does not result in the plant ceasing to grow altogether without the capacity to resume growth. Mild stress in the sense of the invention leads to a reduction in the growth of the stressed plants of less than 40%, 35%, 30% or 25%, more preferably less than 20% or 15% in comparison to the control plant under non-stress conditions. Due to advances in agricultural practices (irrigation, fertilization, pesticide treatments) severe stresses are not often encountered in cultivated crop plants. As a consequence, the compromised growth induced by mild stress is often an undesirable feature for agriculture. Abiotic stresses may be due to drought or excess water, anaerobic stress, salt stress, chemical toxicity, oxidative stress and hot, cold or freezing temperatures.

[0587] “Biotic stresses” are typically those stresses caused by pathogens, such as bacteria, viruses, fungi, nematodes and insects.

[0588] The “abiotic stress” may be an osmotic stress caused by a water stress, e.g. due to drought, salt stress, or freezing stress. Abiotic stress may also be an oxidative stress or a cold stress. “Freezing stress” is intended to refer to stress due to freezing temperatures, i.e. temperatures at which available water molecules freeze and turn into ice. “Cold stress”, also called “chilling stress”, is intended to refer to cold temperatures, e.g. temperatures below 10°, or preferably below 5° C., but at which water molecules do not freeze. As reported in Wang et al. (Planta (2003) 218: 1-14), abiotic stress leads to a series of morphological, physiological, biochemical and molecular changes that adversely affect plant growth and productivity. Drought, salinity, extreme temperatures and oxidative stress are known to be interconnected and may induce growth and cellular damage through similar mechanisms. Rabbani et al. (Plant Physiol (2003) 133: 1755-1767) describes a particularly high degree of “cross talk” between drought stress and high-salinity stress. For example, drought and/or salinisation are manifested primarily as osmotic stress, resulting in the disruption of homeostasis and ion distribution in the cell. Oxidative stress, which frequently accompanies high or low temperature, salinity or drought stress, may cause denaturing of functional and structural proteins. As a consequence, these diverse environmental stresses often activate similar cell signalling pathways and cellular responses, such as the production of stress proteins, up-regulation of anti-oxidants, accumulation of compatible solutes and growth arrest. The term “non-stress” conditions as used herein are those environmental conditions that allow optimal growth of plants. Persons skilled in the art are aware of normal soil conditions and climatic conditions for a given location. Plants with optimal growth conditions, (grown under non-stress conditions) typically yield in increasing order of preference at least 97%, 95%, 92%, 90%, 87%, 85%, 83%, 80%, 77% or 75% of the average production of such plant in a given environment. Average production may be calculated on harvest and/or season basis. Persons skilled in the art are aware of average yield productions of a crop.

[0589] In particular, the methods of the present invention may be performed under non-stress conditions. In an example, the methods of the present invention may be performed under non-stress conditions such as mild drought to give plants having increased yield relative to control plants.

[0590] In another embodiment, the methods of the present invention may be performed under stress conditions.

[0591] In an example, the methods of the present invention may be performed under stress conditions such as drought to give plants having increased yield relative to control plants.

[0592] In another example, the methods of the present invention may be performed under stress conditions such as nutrient deficiency to give plants having increased yield relative to control plants.

[0593] Nutrient deficiency may result from a lack of nutrients such as nitrogen, phosphates and other phosphorous-containing compounds, potassium, calcium, magnesium, manganese, iron and boron, amongst others.

[0594] In yet another example, the methods of the present invention may be performed under stress conditions such as salt stress to give plants having increased yield relative to control plants. The term salt stress is not restricted to common salt (NaCl), but may be any one or more of: NaCl, KCl, LiCl, MgCl₂, CaCl₂, amongst others.

[0595] In yet another example, the methods of the present invention may be performed under stress conditions such as cold stress or freezing stress to give plants having increased yield relative to control plants.

[0596] Increase/Improve/Enhance

[0597] The terms “increase”, “improve” or “enhance” are interchangeable and shall mean in the sense of the application at least a 3%, 4%, 5%, 6%, 7%, 8%, 9% or 10%, preferably at least 15% or 20%, more preferably 25%, 30%, 35% or 40% more yield and/or growth in comparison to control plants as defined herein.

[0598] Seed Yield

[0599] Increased seed yield may manifest itself as one or more of the following:
[0600] a) an increase in seed biomass (total seed weight) which may be on an individual seed basis and/or per plant and/or per square meter;
[0601] b) increased number of flowers per plant;
[0602] c) increased number of seeds;
[0603] d) increased seed filling rate (which is expressed as the ratio between the number of filled florets divided by the total number of florets);
[0604] e) increased harvest index, which is expressed as a ratio of the yield of harvestable parts, such as seeds, divided by the biomass of aboveground plant parts; and
[0605] f) increased thousand kernel weight (TKW), which is extrapolated from the number of seeds counted and their total weight. An increased TKW may result from an increased seed size and/or seed weight, and may also result from an increase in embryo and/or endosperm size.

[0606] The terms “filled florets” and “filled seeds” may be considered synonyms.

[0607] An increase in seed yield may also be manifested as an increase in seed size and/or seed volume. Furthermore, an increase in seed yield may also manifest itself as an increase in seed area and/or seed length and/or seed width and/or seed perimeter.

[0608] Greenness Index

[0609] The “greenness index” as used herein is calculated from digital images of plants. For each pixel belonging to the plant object on the image, the ratio of the green value versus the red value (in the RGB model for encoding color) is calculated. The greenness index is expressed as the percentage of pixels for which the green-to-red ratio exceeds a given threshold. Under normal growth conditions, under salt stress growth conditions, and under reduced nutrient availability growth conditions, the greenness index of plants is measured in the last imaging before flowering. In contrast, under drought stress growth conditions, the greenness index of plants is measured in the first imaging after drought.

[0610] Biomass

[0611] The term “biomass” as used herein is intended to refer to the total weight of a plant. Within the definition of biomass, a distinction may be made between the biomass of one or more parts of a plant, which may include any one or more of the following:
[0612] aboveground parts such as but not limited to shoot biomass, seed biomass, leaf biomass, etc.;
[0613] aboveground harvestable parts such as but not limited to shoot biomass, seed biomass, leaf biomass, etc.;
[0614] parts below ground, such as but not limited to root biomass, tubers, bulbs, etc.;
[0615] harvestable parts below ground, such as but not limited to root biomass, tubers, bulbs, etc.;
[0616] harvestable parts partially below ground such as but not limited to beets and other hypocotyl areas of a plant, rhizomes, stolons or creeping rootstalks;
[0617] vegetative biomass such as root biomass, shoot biomass, etc.;
[0618] reproductive organs; and
[0619] propagules such as seed.

[0620] Marker Assisted Breeding

[0621] Such breeding programmes sometimes require introduction of allelic variation by mutagenic treatment of the plants, using for example EMS mutagenesis; alternatively, the programme may start with a collection of allelic variants of so called “natural” origin caused unintentionally. Identification of allelic variants then takes place, for example, by PCR. This is followed by a step for selection of superior allelic variants of the sequence in question and which give increased yield. Selection is typically carried out by monitoring growth performance of plants containing different allelic variants of the sequence in question. Growth performance may be monitored in a greenhouse or in the field. Further optional steps include crossing plants in which the superior allelic variant was identified with another plant. This could be used, for example, to make a combination of interesting phenotypic features.

[0622] Use as Probes in (Gene Mapping)

[0623] Use of nucleic acids encoding the protein of interest for genetically and physically mapping the genes requires only a nucleic acid sequence of at least 15 nucleotides in length. These nucleic acids may be used as restriction fragment length polymorphism (RFLP) markers. Southern blots (Sambrook J, Fritsch E F and Maniatis T (1989) Molecular Cloning, A Laboratory Manual) of restriction-digested plant genomic DNA may be probed with the nucleic acids encoding the protein of interest. The resulting banding patterns may then be subjected to genetic analyses using computer programs such as MapMaker (Lander et al. (1987) Genomics 1: 174-181) in order to construct a genetic map. In addition, the nucleic acids may be used to probe Southern blots containing restriction endonuclease-treated genomic DNAs of a set of individuals representing parent and progeny of a defined genetic cross. Segregation of the DNA polymorphisms is noted and used to calculate the position of the nucleic acid encoding the protein of interest in the genetic map previously obtained using this population (Botstein et al. (1980) Am. J. Hum. Genet. 32:314-331).

[0624] The production and use of plant gene-derived probes for use in genetic mapping is described in Bernatzky and Tanksley (1986) Plant Mol. Biol. Reporter 4: 37-41. Numerous publications describe genetic mapping of specific cDNA clones using the methodology outlined above or variations thereof. For example, F2 intercross populations, backcross populations, randomly mated populations, near isogenic lines, and other sets of individuals may be used for mapping. Such methodologies are well known to those skilled in the art.

[0625] The nucleic acid probes may also be used for physical mapping (i.e., placement of sequences on physical maps; see Hoheisel et al. In: Non-mammalian Genomic Analysis: A Practical Guide, Academic press 1996, pp. 319-346, and references cited therein).

[0626] In another embodiment, the nucleic acid probes may be used in direct fluorescence in situ hybridisation (FISH) mapping (Trask (1991) Trends Genet. 7:149-154). Although current methods of FISH mapping favour use of large clones (several kb to several hundred kb; see Laan et al. (1995) Genome Res. 5:13-20), improvements in sensitivity may allow performance of FISH mapping using shorter probes.

[0627] A variety of nucleic acid amplification-based methods for genetic and physical mapping may be carried out using the nucleic acids. Examples include allele-specific amplification (Kazazian (1989) J. Lab. Clin. Med 11:95-96), polymorphism of PCR-amplified fragments (CAPS; Sheffield et al. (1993) Genomics 16:325-332), allele-specific ligation (Landegren et al. (1988) Science 241:1077-1080), nucleotide extension reactions (Sokolov (1990) Nucleic Acid Res. 18:3671), Radiation Hybrid Mapping (Walter et al. (1997) Nat. Genet. 7:22-28) and Happy Mapping (Dear and Cook (1989) Nucleic Acid Res. 17:6795-6807). For these methods, the sequence of a nucleic acid is used to design and produce primer pairs for use in the amplification reaction or in primer extension reactions. The design of such primers is well known to those skilled in the art. In methods employing PCR-based genetic mapping, it may be necessary to identify DNA sequence differences between the parents of the mapping cross in the region corresponding to the instant nucleic acid sequence. This, however, is generally not necessary for mapping methods.

[0628] Plant

[0629] The term “plant” as used herein encompasses whole plants, ancestors and progeny of the plants and plant parts, including seeds, shoots, stems, leaves, roots (including tubers), flowers, and tissues and organs, wherein each of the aforementioned comprise the gene/nucleic acid of interest. The term “plant” also encompasses plant cells, suspension cultures, callus tissue, embryos, meristematic regions, gametophytes, sporophytes, pollen and micro spores, again wherein each of the aforementioned comprises the gene/nucleic acid of interest.

[0630] Plants that are particularly useful in the methods of the invention include all plants which belong to the superfamily Viridiplantae, in particular monocotyledonous and dicotyledonous plants including fodder or forage legumes, ornamental plants, food crops, trees or shrubs selected from the list comprising Acer spp., Actinidia spp., Abelmoschus spp., Agave sisalana, Agropyron spp., Agrostis stolonifera, Allium spp., Amaranthus spp., Ammophila arenaria, Ananas comosus, Annona spp., Apium graveolens, Arachis spp, Artocarpus spp., Asparagus officinalis, Avena spp. (e.g. Avena sativa, Avena fatua, Avena byzantina, Avena fatua var. sativa, Avena hybrida), Averrhoa carambola, Bambusa sp., Benincasa hispida, Bertholletia excelsea, Beta vulgaris, Brassica spp. (e.g. Brassica napus, Brassica rapa ssp. [canola, oilseed rape, turnip rape]), Cadaba farinosa, Camellia sinensis, Canna indica, Cannabis sativa, Capsicum spp., Carex elata, Carica papaya, Carissa macrocarpa, Carya spp., Carthamus tinctorius, Castanea spp., Ceiba pentandra, Cichorium endivia, Cinnamomum spp., Citrullus lanatus, Citrus spp., Cocos spp., Coffea spp., Colocasia esculenta, Cola spp., Corchorus sp., Coriandrum sativum, Corylus spp., Crataegus spp., Crocus sativus, Cucurbita spp., Cucumis spp., Cynara spp., Daucus carota, Desmodium spp., Dimocarpus longan, Dioscorea spp., Diospyros spp., Echinochloa spp., Elaeis (e.g. Elaeis guineensis, Elaeis oleifera), Eleusine coracana, Eragrostis tef, Erianthus sp., Eriobotrya japonica, Eucalyptus sp., Eugenia uniflora, Fagopyrum spp., Fagus spp., Festuca arundinacea, Ficus carica, Fortunella spp., Fragaria spp., Ginkgo biloba, Glycine spp. (e.g. Glycine max, Soja hispida or Soja max), Gossypium hirsutum, Helianthus spp. (e.g. Helianthus annuus), Hemerocallis fulva, Hibiscus spp., Hordeum spp. (e.g. Hordeum vulgare), Ipomoea batatas, Juglans spp., Lactuca sativa, Lathyrus spp., Lens culinaris, Linum usitatissimum, Litchi chinensis, Lotus spp., Luffa acutangula, Lupinus spp., Luzula sylvatica, Lycopersicon spp. (e.g. Lycopersicon esculentum, Lycopersicon lycopersicum, Lycopersicon pyriforme), Macrotyloma spp., Malus spp., Malpighia emarginata, Mammea americana, Mangifera indica, Manihot spp., Manilkara zapota, Medicago sativa, Melilotus spp., Mentha spp., Miscanthus sinensis, Momordica spp., Morus nigra, Musa spp., Nicotiana spp., Olea spp., Opuntia spp., Ornithopus spp., Oryza spp. (e.g. Oryza sativa, Oryza latifolia), Panicum miliaceum, Panicum virgatum, Passiflora edulis, Pastinaca sativa, Pennisetum sp., Persea spp., Petroselinum crispum, Phalaris arundinacea, Phaseolus spp., Phleum pratense, Phoenix spp., Phragmites australis, Physalis spp., Pinus spp., Pistacia vera, Pisum spp., Poa spp., Populus spp., Prosopis spp., Prunus spp., Psidium spp., Punica granatum, Pyrus communis, Quercus spp., Raphanus sativus, Rheum rhabarbarum, Ribes spp., Ricinus communis, Rubus spp., Saccharum spp., Salix sp., Sambucus spp., Secale cereale, Sesamum spp., Sinapis sp., Solanum spp. (e.g. Solanum tuberosum, Solanum integrifolium or Solanum lycopersicum), Sorghum bicolor, Spinacia spp., Syzygium spp., Tagetes spp., Tamarindus indica, Theobroma cacao, Trifolium spp., Tripsacum dactyloides, Triticosecale rimpaui, Triticum spp. (e.g. Triticum aestivum, Triticum durum, Triticum turgidum, Triticum hybernum, Triticum macha, Triticum sativum, Triticum monococcum or Triticum vulgare), Tropaeolum minus, Tropaeolum majus, Vaccinium spp., Vicia spp., Vigna spp., Viola odorata, Vitis spp., Zea mays, Zizania palustris, Ziziphus spp., amongst others.

[0631] Control Plant(s)

[0632] The choice of suitable control plants is a routine part of an experimental setup and may include corresponding wild type plants or corresponding plants without the gene of interest. The control plant is typically of the same plant species or even of the same variety as the plant to be assessed. The control plant may also be a nullizygote of the plant to be assessed. Nullizygotes (or null control plants) are individuals missing the transgene by segregation. Further, control plants are grown under equal growing conditions to the growing conditions of the plants of the invention, i.e. in the vicinity of, and simultaneously with, the plants of the invention. A “control plant” as used herein refers not only to whole plants, but also to plant parts, including seeds and seed parts.

### DESCRIPTION OF FIGURES

[0633] The present invention will now be described with reference to the following figures in which:

[0634] FIG. 1 represents the domain structure of SEQ ID NO: 2 with conserved motifs.

[0635] FIG. 2 represents the domain structure of SEQ ID NO: 4 with conserved motifs.

[0636] FIG. 3 represents a multiple alignment of various DUF642 polypeptides. These alignments can be used for defining further motifs or signature sequences, when using conserved amino acids. The corresponding SEQ ID NO's for the aligned polypeptide sequences shown in FIG. 3 are:

| Annotation | SEQ ID NO: |
|---|---|
| A. lyrata_340195 | 58 |
| A. thaliana_AT1G80240.1 | 68 |
| B. napus_TC65362 | 72 |
| B. napus_TC77368 | 74 |
| O. sativa_LOC_Os01g42520.1 | 6 |
| P. virgatum_TC46275 | 18 |
| S. bicolor_Sb03g027650.1 | 20 |
| Z. mays_TC458850 | 36 |
| Zea_mays_GRMZM2G034985_T02 | 42 |
| T. aestivum_c60008104@11410 | 34 |
| O. sativa_LOC_Os04g41710.1 | 8 |
| O. sativa_LOC_Os04g41740.1 | 10 |
| Os_DUF642.3 | 2 |
| O. sativa_LOC_Os04g41750.1 | 12 |
| S. bicolor_Sb06g021280.1 | 24 |
| Z. mays_ZM07MC22756_BFb0088A01@22693 | 40 |
| Zea_mays_GRMZM2G051898_T01 | 44 |
| S. bicolor_Sb06g021290.1 | 26 |
| O. sativa_LOC_Os04g41759.1 | 14 |
| S. bicolor_Sb06g021320.1 | 32 |
| S. bicolor_Sb06g021300.1 | 28 |
| Z. mays_TC468877 | 38 |
| S. bicolor_Sb06g021310.1 | 30 |
| O. sativa_LOC_Os04g41770.1 | 16 |
| S. bicolor_Sb06g021270.1 | 22 |
| Zea_mays_GRMZM2G051912_T01 | 46 |
| Zea_mays_GRMZM2G405071_T01 | 48 |
| O. sativa_LOC_Os02g11040.1 | 50 |
| Os_DUF642.2 | 4 |
| P. virgatum_TC392 | 52 |
| S. bicolor_Sb04g007160.1 | 54 |
| Z. mays_TC467870 | 56 |
| P. sitchensis_TA14284_3332 | 122 |
| P. taeda_TA10429_3352 | 124 |
| A. lyrata_912808 | 62 |
| A. thaliana_AT1G29980.1 | 66 |
| A. lyrata_934049 | 64 |
| C. annuum_TC19321 | 78 |
| S. tuberosum_TC189725 | 150 |
| J. hindsii_x_regia_TA1156_432290 | 102 |
| G. hirsutum_TC135941 | 84 |
| G. raimondii_TC1124 | 96 |
| G. max_GM06MC25068_saa05g06@24507 | 92 |
| G. max_TC286277 | 94 |
| L. japonicus_TC41787 | 104 |
| M. domestica_TC32901 | 108 |
| P. trifoliata_TA6477_37690 | 134 |
| P. trichocarpa_DUF | 158 |
| P. trichocarpa_MUB2 | 160 |
| T. officinale_TA3338_50225 | 156 |
| H. vulgare_TC163732 | 98 |
| T. aestivum_TC292522 | 152 |
| O. sativa_LOC_Os01g55190.1 | 116 |
| P. virgatum_TC7090 | 136 |
| S. bicolor_Sb03g034960.1 | 142 |
| officinarum_TC76182 | 148 |
| Z. mays_c62082358gm030403@7546 | 172 |
| Z. mays_ZM07MC26525_BFb0211C02@26447 | 176 |
| Zea_mays_GRMZM2G324705_T01 | 180 |
| Z. officinale_TA720_94328 | 178 |
| P. sitchensis_TA10533_3332 | 120 |
| P. taeda_TA4773_3352 | 126 |
| O. sativa_LOC_Os03g59300.1 | 118 |
| S. bicolor_Sb01g004270.1 | 140 |
| Z. mays_c57213778gm030403@389 | 170 |
| Z. mays_TC506958 | 174 |
| P. trichocarpa_735032 | 130 |
| V. vinifera_GSVIVT00025589001 | 166 |
| S. lycopersicum_TC198542 | 144 |
| Triphysaria_sp_TC11756 | 162 |
| G. max_Glyma09g36220.1 | 88 |
| M. truncatula_AC174305_19.4 | 110 |
| G. max_Glyma15g43180.1 | 90 |
| P. vulgaris_TC10932 | 138 |
| A. lyrata_478145 | 60 |
| A. thaliana_AT3G08030.1 | 70 |
| B. napus_TC89135 | 76 |
| G. hirsutum_TC161608 | 86 |
| T. cacao_TC4474 | 154 |
| L. serriola_TC5542 | 106 |
| C. sinensis_TC3550 | 80 |
| P. trichocarpa_549292 | 128 |
| P. trichocarpa_833200 | 132 |
| V. vinifera_GSVIVT00028751001 | 168 |
| F. vesca_TA10399_57918 | 82 |
| N. benthamiana_TC11106 | 112 |
| N. tabacum_TC43533 | 114 |
| S. lycopersicum_TC199778 | 146 |
| Triphysaria_sp_TC1599 | 164 |
| I. nil_TC4208 | 100 |

[0637] FIG. 4 represents a multiple alignment of a selection (clade A) of DUF642 polypeptides from FIG. 3. The corresponding SEQ ID NO's for the aligned polypeptide sequences shown in FIG. 4 are:

| Annotation | SEQ ID NO: |
|---|---|
| O. sativa_LOC_Os01g42520.1 | 6 |
| P. virgatum_TC46275 | 18 |
| S. bicolor_Sb03g027650.1 | 20 |
| Z. mays_TC458850 | 36 |
| Zea_mays_GRMZM2G034985_T02 | 42 |
| T. aestivum_c60008104@11410 | 34 |
| O. sativa_LOC_Os04g41710.1 | 8 |
| O. sativa_LOC_Os04g41740.1 | 10 |
| Os_DUF642.3 | 2 |
| O. sativa_LOC_Os04g41750.1 | 12 |
| SEQ ID NO: 24 for S. bicolor_Sb06g021280.1 | 24 |
| Z. mays_ZM07MC22756_BFb0088A01@22693 | 40 |
| Zea_mays_GRMZM2G051898_T01 | 44 |
| S. bicolor_Sb06g021290.1 | 26 |
| O. sativa_LOC_Os04g41759.1 | 14 |
| S. bicolor_Sb06g021320.1 | 32 |
| S. bicolor_Sb06g021300.1 | 28 |
| Z. mays_TC468877 | 38 |
| S. bicolor_Sb06g021310.1 | 30 |
| O. sativa_LOC_Os04g41770.1 | 16 |
| S. bicolor_Sb06g021270.1 | 22 |
| Zea_mays_GRMZM2G051912_T01 | 46 |
| Zea_mays_GRMZM2G405071_T01 | 48 |
| O. sativa_LOC_Os02g11040.1 | 50 |
| Os_DUF642.2 | 4 |
| P. virgatum_TC392 | 52 |
| S. bicolor_Sb04g007160.1 | 54 |
| Z. mays_TC467870 | 56 |

[0638] FIG. 5 shows a phylogenetic tree of DUF642 polypeptides, as described in Example 2. Clade A is encircled, the remainder of the branches of the tree are grouped in clade B.

[0639] FIG. 6 shows the MATGAT table of Example 3.

[0640] FIG. 7 represents the binary vector used for increased expression in Oryza sativa of a DUF642-encoding nucleic acid under the control of a rice GOS2 promoter (pGOS2).

[0641] FIG. 8 represents the domain structure of SEQ ID NO: 198 with conserved motifs.

[0642] FIG. 9 represents a multiple alignment of the epimerase-related like polypeptides as listed in table A. These alignments can be used for defining further motifs or signature sequences, when using conserved amino acids.

[0643] FIG. 10 shows phylogenetic tree of epimerase-related like polypeptides. To obtain the tree, protein sequences were aligned with MAFFT, a bootstrapped Neighbour Joining (NJ) tree was calculated with QuickTree (100 repeats, uncorrected), which was visualized with Dendroscope (for further details on the used techniques see example 2)

[0644] FIG. 11 shows the MATGAT table of Example 3.

[0645] FIG. 12 represents the binary vector used for increased expression in Oryza sativa of a nucleic acid encoding an epimerase-related like polypeptide under the control of a rice GOS2 promoter (pGOS2).

[0646] FIG. 13 represents the domain structure of SEQ ID NO: 285 with conserved motifs.

[0647] FIG. 14 shows phylogenetic tree of PLPCase polypeptides, showing three clusters.

[0648] FIG. 15 shows the MatGAT table of Example 3.

[0649] FIG. 16 represents the binary vector used for increased expression in Oryza sativa of a PLPCase-encoding nucleic acid under the control of a rice GOS2 promoter (pGOS2).

### EXAMPLES

[0650] The present invention will now be described with reference to the following examples, which are by way of illustration only. The following examples are not intended to limit the scope of the invention. Unless otherwise indicated, the present invention employs conventional techniques and methods of plant biology, molecular biology, bioinformatics and plant breedings.

[0651] DNA manipulation: unless otherwise stated, recombinant DNA techniques are performed according to standard protocols described in (Sambrook (2001) Molecular Cloning: a laboratory manual, 3rd Edition Cold Spring Harbor Laboratory Press, CSH, New York) or in Volumes 1 and 2 of Ausubel et al. (1994), Current Protocols in Molecular Biology, Current Protocols. Standard materials and methods for plant molecular work are described in Plant Molecular Biology Labfax (1993) by R. D. D. Croy, published by BIOS Scientific Publications Ltd (UK) and Blackwell Scientific Publications (UK).

### Example 1: Identification of Sequences Related to the Nucleic Acid Sequence Used in the Methods of Intervention

[0652] 1. DUF642 Polypeptides

[0653] Sequences (full length cDNA, ESTs or genomic) related to SEQ ID NO: 1 and SEQ ID NO: 2; and SEQ ID NO: 3 and SEQ ID NO: 4 were identified amongst those maintained in the Entrez Nucleotides database at the National Center for Biotechnology Information (NCBI) using database sequence search tools, such as the Basic Local Alignment Tool (BLAST) (Altschul et al. (1990) J. Mol. Biol. 215:403-410; and Altschul et al. (1997) Nucleic Acids Res. 25:3389-3402). The program is used to find regions of local similarity between sequences by comparing nucleic acid or polypeptide sequences to sequence databases and by calculating the statistical significance of matches. For example, the polypeptide encoded by the nucleic acid of SEQ ID NO: 1 was used for the TBLASTN algorithm, with default settings and the filter to ignore low complexity sequences set off. The output of the analysis was viewed by pairwise comparison, and ranked according to the probability score (E-value), where the score reflect the probability that a particular alignment occurs by chance (the lower the E-value, the more significant the hit). In addition to E-values, comparisons were also scored by percentage identity. Percentage identity refers to the number of identical nucleotides (or amino acids) between the two compared nucleic acid (or polypeptide) sequences over a particular length. In some instances, the default parameters may be adjusted to modify the stringency of the search. For example the E-value may be increased to show less stringent matches. This way, short nearly exact matches may be identified.

[0654] Table A1 provides a list of nucleic acid and protein sequences related to SEQ ID NO: 1, SEQ ID NO: 2, SEQ ID NO: 3 and SEQ ID NO: 4.

TABLE A1
Examples of DUF642 nucleic acids and polypeptides:

| | Nucleic acid | Protein |
|---|---|---|
| | SEQ | SEQ |
| Plant Source_name | ID NO: | ID NO: |
| O. sativa_DUF642.3 | 1 | 2 |
| O. sativa_DUF642.2 | 3 | 4 |
| O. sativa_LOC_Os01g42520.1 | 5 | 6 |
| O. sativa_LOC_Os04g41710.1 | 7 | 8 |
| O. sativa_LOC_Os04g41740.1 | 9 | 10 |
| O. sativa_LOC_Os04g41750.1 | 11 | 12 |
| O. sativa_LOC_Os04g41759.1 | 13 | 14 |
| O. sativa_LOC_Os04g41770.1 | 15 | 16 |
| P. virgatum_TC46275 | 17 | 18 |
| S. bicolor_Sb03g027650.1 | 19 | 20 |
| S. bicolor_Sb06g021270.1 | 21 | 22 |
| S. bicolor_Sb06g021280.1 | 23 | 24 |
| S. bicolor_Sb06g021290.1 | 25 | 26 |
| S. bicolor_Sb06g021300.1 | 27 | 28 |
| S. bicolor_Sb06g021310.1 | 29 | 30 |
| S. bicolor_Sb06g021320.1 | 31 | 32 |
| T. aestivum_c60008104@11410 | 33 | 34 |
| Z. mays_TC458850 | 35 | 36 |
| Z. mays_TC468877 | 37 | 38 |
| Z. mays_ZM07MC22756_BFb0088A01@22693 | 39 | 40 |
| Z. mays_GRMZM2G034985_T02 | 41 | 42 |
| Z. mays_GRMZM2G051898_T01 | 43 | 44 |
| Z. mays_GRMZM2G051912_T01 | 45 | 46 |
| Z. mays_GRMZM2G405071_T01 | 47 | 48 |
| O. sativa_LOC_Os02g11040.1 | 49 | 50 |
| P. virgatum_TC392 | 51 | 52 |
| S. bicolor_Sb04g007160.1 | 53 | 54 |
| Z. mays_TC467870 | 55 | 56 |
| A. lyrata_340195 | 57 | 58 |
| A. lyrata_478145 | 59 | 60 |
| A. lyrata_912808 | 61 | 62 |
| A. lyrata_934049 | 63 | 64 |
| A. thaliana_AT1G29980.1 | 65 | 66 |
| A. thaliana_AT1G80240.1 | 67 | 68 |
| A. thaliana_AT3G08030.1 | 69 | 70 |
| B. napus_TC65362 | 71 | 72 |
| B. napus_TC77368 | 73 | 74 |
| B. napus_TC89135 | 75 | 76 |
| C. annuum_TC19321 | 77 | 78 |
| C. sinensis_TC3550 | 79 | 80 |
| F. vesca_TA10399_57918 | 81 | 82 |
| G. hirsutum_TC135941 | 83 | 84 |
| G. hirsutum_TC161608 | 85 | 86 |
| G. max_Glyma09g36220.1 | 87 | 88 |
| G. max_Glyma15g43180.1 | 89 | 90 |
| G. max_GM06MC25068_saa05g06@24507 | 91 | 92 |
| G. max_TC286277 | 93 | 94 |
| G. raimondii_TC1124 | 95 | 96 |
| H. vulgare_TC163732 | 97 | 98 |
| I. nil_TC4208 | 99 | 100 |
| J. hindsii_x_regia_TA1156_432290 | 101 | 102 |
| L. japonicus_TC41787 | 103 | 104 |
| L. serriola_TC5542 | 105 | 106 |
| M. domestica_TC32901 | 107 | 108 |
| M. truncatula_AC174305_19.4 | 109 | 110 |
| N. benthamiana_TC11106 | 111 | 112 |
| N. tabacum_TC43533 | 113 | 114 |
| O. sativa_LOC_Os01g55190.1 | 115 | 116 |
| O. sativa_LOC_Os03g59300.1 | 117 | 118 |
| P. sitchensis_TA10533_3332 | 119 | 120 |
| P. sitchensis_TA14284_3332 | 121 | 122 |
| P. taeda_TA10429_3352 | 123 | 124 |
| P. taeda_TA4773_3352 | 125 | 126 |
| P. trichocarpa_549292 | 127 | 128 |
| P. trichocarpa_735032 | 129 | 130 |
| P. trichocarpa_833200 | 131 | 132 |
| P. trifoliata_TA6477_37690 | 133 | 134 |
| P. virgatum_TC7090 | 135 | 136 |
| P. vulgaris_TC10932 | 137 | 138 |
| S. bicolor_Sb01g004270.1 | 139 | 140 |
| S. bicolor_Sb03g034960.1 | 141 | 142 |
| S. lycopersicum_TC198542 | 143 | 144 |
| S. lycopersicum_TC199778 | 145 | 146 |
| S. officinarum_TC76182 | 147 | 148 |
| S. tuberosum_TC189725 | 149 | 150 |
| T. aestivum_TC292522 | 151 | 152 |
| T. cacao_TC4474 | 153 | 154 |
| T. officinale_TA3338_50225 | 155 | 156 |
| P. trichocarpa_DUF | 157 | 158 |
| P. trichocarpa PP_MUB2 | 159 | 160 |
| Triphysaria_sp_TC11756 | 161 | 162 |
| Triphysaria_sp_TC1599 | 163 | 164 |
| V. vinifera_GSVIVT00025589001 | 165 | 166 |
| V. vinifera_GSVIVT00028751001 | 167 | 168 |
| Z. mays_c57213778gm030403@389 | 169 | 170 |
| Z. mays_c62082358gm030403@7546 | 171 | 172 |
| Z. mays_TC506958 | 173 | 174 |
| Z. mays_ZM07MC26525_BFb0211C02@26447 | 175 | 176 |
| Z. officinale_TA720_94328 | 177 | 178 |
| Z. mays_GRMZM2G324705_T01 | 179 | 180 |

[0655] 2. Epimerase-Related Like Polypeptides

[0656] Sequences (full length cDNA, ESTs or genomic) related to SEQ ID NO: 197 and SEQ ID NO: 198 were identified amongst those maintained in the Entrez Nucleotides database at the National Center for Biotechnology Information (NCBI) using database sequence search tools, such as the Basic Local Alignment Tool (BLAST) (Altschul et al. (1990) J. Mol. Biol. 215:403-410; and Altschul et al. (1997) Nucleic Acids Res. 25:3389-3402). The program is used to find regions of local similarity between sequences by comparing nucleic acid or polypeptide sequences to sequence databases and by calculating the statistical significance of matches. For example, the polypeptide encoded by the nucleic acid of SEQ ID NO: 197 was used for the TBLASTN algorithm, with default settings and the filter to ignore low complexity sequences set off. The output of the analysis was viewed by pairwise comparison, and ranked according to the probability score (E-value), where the score reflect the probability that a particular alignment occurs by chance (the lower the E-value, the more significant the hit). In addition to E-values, comparisons were also scored by percentage identity. Percentage identity refers to the number of identical nucleotides (or amino acids) between the two compared nucleic acid (or polypeptide) sequences over a particular length. In some instances, the default parameters may be adjusted to modify the stringency of the search. For example the E-value may be increased to show less stringent matches. This way, short nearly exact matches may be identified.

[0657] Table A2 provides SEQ ID NO: 197 and SEQ ID NO: 198. and a list of nucleic acid and protein sequences related to SEQ ID NO: 197 and SEQ ID NO: 198.

TABLE A2
Examples of an epimerase-related like nucleic acids and polypeptides:

| | SEQ ID | SEQ ID |
|---|---|---|
| | NO: | NO: |
| Plant Source | protein | nucleic acid |
| Poptr_epimerase-related | 198 | 197 |
| Z. mays_ZM07MC24472_BFb0052A17@24402 | 200 | 199 |
| A. lyrata_486720 | 202 | 201 |
| A. lyrata_489502 | 204 | 203 |
| A. thaliana_AT3G62130.1 | 206 | 205 |
| A. thaliana_AT5G26600.1 | 208 | 207 |
| Aquilegia_sp_TC26581 | 210 | 209 |
| B. napus_TC63646 | 212 | 211 |
| C. clementina_TC23968 | 214 | 213 |
| C. sinensis_TC2568 | 216 | 215 |
| G. hirsutum_TC132670 | 218 | 217 |
| G. max_Glyma02g01070.1 | 220 | 219 |
| G. max_Glyma03g38740.1 | 222 | 221 |
| G. max_Glyma19g41330.1 | 224 | 223 |
| G. max_Glyma20g22430.1 | 226 | 225 |
| H. vulgare_TC158694 | 228 | 227 |
| M. truncatula_AC151948_16.5 | 230 | 229 |
| M. truncatula_AC166315_9.4 | 232 | 231 |
| O. sativa_LOC_Os01g18640.1 | 234 | 233 |
| O. sativa_LOC_Os01g18660.1 | 236 | 235 |
| P. patens_175806 | 238 | 237 |
| P. patens_TC39863 | 240 | 239 |
| P. persica_TC12771 | 242 | 241 |
| P. trichocarpa_570656 | 244 | 243 |
| P. trichocarpa_572528 | 246 | 245 |
| S. bicolor_Sb03g011840.1 | 248 | 247 |
| S. bicolor_Sb03g011840.2 | 250 | 249 |
| S. bicolor_Sb03g011840.3 | 252 | 251 |
| S. bicolor_Sb03g011850.1 | 254 | 253 |
| S. lycopersicum_TC191918 | 256 | 255 |
| S. moellendorffii_232064 | 258 | 257 |
| S. moellendorffii_413706 | 260 | 259 |
| S. tuberosum_TC167698 | 262 | 261 |
| T. aestivum_TC278728 | 264 | 263 |
| V. vinifera_GSVIVT00028240001 | 266 | 265 |
| Z. mays_TC513613 | 268 | 267 |
| Zea_mays_GRMZM2G077212_T01 | 270 | 269 |
| Zea_mays_GRMZM2G322186_T01 | 272 | 271 |

[0658] 3. PLPCase Polypeptides

[0659] Sequences (full length cDNA, ESTs or genomic) related to SEQ ID NO: 284 and SEQ ID NO: 285 were identified amongst those maintained in the Entrez Nucleotides database at the National Center for Biotechnology Information (NCBI) using database sequence search tools, such as the Basic Local Alignment Tool (BLAST) (Altschul et al. (1990) J. Mol. Biol. 215:403-410; and Altschul et al. (1997) Nucleic Acids Res. 25:3389-3402). The program is used to find regions of local similarity between sequences by comparing nucleic acid or polypeptide sequences to sequence databases and by calculating the statistical significance of matches. For example, the polypeptide encoded by the nucleic acid of SEQ ID NO: 284 was used for the TBLASTN algorithm, with default settings and the filter to ignore low complexity sequences set off. The output of the analysis was viewed by pairwise comparison, and ranked according to the probability score (E-value), where the score reflect the probability that a particular alignment occurs by chance (the lower the E-value, the more significant the hit). In addition to E-values, comparisons were also scored by percentage identity. Percentage identity refers to the number of identical nucleotides (or amino acids) between the two compared nucleic acid (or polypeptide) sequences over a particular length. In some instances, the default parameters may be adjusted to modify the stringency of the search. For example the E-value may be increased to show less stringent matches. This way, short nearly exact matches may be identified.

[0660] Table A3 provides a list of nucleic acid and protein sequences related to SEQ ID NO: 284 and SEQ ID NO: 285.

TABLE A3
Examples of PLPCase nucleic acids and polypeptides:

| | Nucleic | |
|---|---|---|
| | acid | Protein |
| | SEQ | SEQ |
| Plant Source | ID NO: | ID NO: |
| M. truncatula_PLPCase | 284 | 285 |
| A. thaliana_AT3G15650.1#1 | 286 | 287 |
| A. thaliana_AT1G52470.1#1 | 288 | 289 |
| G. max_Glyma13g43990.1#1 | 290 | 291 |
| G. max_Glyma08g22420.1#1 | 292 | 293 |
| G. max_Glyma07g03670.1#1 | 294 | 295 |
| A. thaliana_AT1G52700.1#1 | 296 | 297 |
| G. max_GM06MC00001_45093526@1#1 | 298 | 299 |
| P. trichocarpa_TC89207#1 | 300 | 301 |
| T. aestivum_c55164328@10990#1 | 302 | 303 |
| Z. mays_c58236581gm030403@14151#1 | 304 | 305 |
| H. vulgare_BI948365#1 | 306 | 307 |
| H. annuus_TC40709#1 | 308 | 309 |
| B. napus_TC92944#1 | 310 | 311 |
| B. napus_BN06MC12702_43481925@12666#1 | 312 | 313 |
| A. thaliana_AT5G20060.1#1 | 314 | 315 |
| B. napus_BN06MC00524_46010623@523#1 | 316 | 317 |
| H. annuus_TC45565#1 | 318 | 319 |
| M. truncatula_AC148176_15.5#1 | 320 | 321 |
| O. sativa_LOC_Os01g07960.1#1 | 322 | 323 |
| Z. mays_TC480822#1 | 324 | 325 |
| P. trichocarpa_scaff_VI.1824#1 | 326 | 327 |
| P. trichocarpa_809106#1 | 328 | 329 |
| G. max_TC317555#1 | 330 | 331 |
| G. max_Glyma04g07280.1#1 | 332 | 333 |
| Z. mays_TC563901#1 | 334 | 335 |
| Z. mays_ZM07MC31087_BFb0267E17@30994#1 | 336 | 337 |
| T. aestivum_TC296583#1 | 338 | 339 |
| Zea_mays_GRMZM2G481362_T01#1 | 340 | 341 |
| O. sativa_LOC_Os01g42690.1#1 | 342 | 343 |
| O. sativa_LOC_Os05g51050.1#1 | 344 | 345 |
| Z. mays_ZM07MC23122_BFb0221H24@23057#1 | 346 | 347 |

[0661] Sequences have been tentatively assembled and publicly disclosed by research institutions, such as The Institute for Genomic Research (TIGR; beginning with TA). For instance, the Eukaryotic Gene Orthologs (EGO) database may be used to identify such related sequences, either by keyword search or by using the BLAST algorithm with the nucleic acid sequence or polypeptide sequence of interest. Special nucleic acid sequence databases have been created for particular organisms, e.g. for certain prokaryotic organisms, such as by the Joint Genome Institute. Furthermore, access to proprietary databases, has allowed the identification of novel nucleic acid and polypeptide sequences.

### Example 2: Alignment of Sequences to the Polypeptide Sequences Used in the Methods of the Invention

[0662] 1. DUF642 Polypeptides

[0663] Alignment of polypeptide sequences was performed using the AlignX alignment of Vector NTI, Invitrogen, 10.3 (2006) with gap opening penalty of 10.0, gap extension penalty of 0.05 and gap separation penalty range 8. The DUF642 polypeptides are aligned in FIG. 2, showing DUF642 polypeptides of clades A and B. FIG. 3 shows an alignment of the DUF642 polypeptides of clade A (as shown in FIG. 5).

[0664] A phylogenetic tree of DUF642 polypeptides (FIG. 5) was constructed by aligning DUF642 sequences using MAFFT (Katoh and Toh (2008)—Briefings in Bioinformatics 9:286-298). A neighbour-joining tree was calculated using Quick-Tree (Howe et al. (2002), Bioinformatics 18(11): 1546-7), 100 bootstrap repetitions. The dendrogram was drawn using Dendroscope (Huson et al. (2007), BMC Bioinformatics 8(1):460). Confidence levels for 100 bootstrap repetitions are indicated for major branchings.

[0665] 2. Epimerase-Related Like Polypeptides

[0666] Alignment of polypeptide sequences was performed using MAFFT (version 6.624, L-INS-I method—Katoh and Toh (2008)—Briefings in Bioinformatics 9:286-298). Minor manual editing was done to further optimize the alignment. A representative number of epimerase-related like polypeptides are aligned in FIG. 9.

[0667] A phylogenetic tree of epimerase-related like polypeptides (FIG. 10) was constructed by aligning epimerase-related like sequences using MAFFT (Katoh and Toh (2008)—Briefings in Bioinformatics 9:286-298). A neighbour-joining tree was calculated using Quick-Tree (Howe et al. (2002), Bioinformatics 18(11): 1546-7), 100 bootstrap repetitions. The dendrogram was drawn using Dendroscope (Huson et al. (2007), BMC Bioinformatics 8(1):460). Confidence levels for 100 bootstrap repetitions are indicated for major branchings.

[0668] 3. PLPCase Polypeptides

[0669] Alignment of polypeptide sequences is performed using the ClustalW 2.0 algorithm of progressive alignment (Thompson et al. (1997) Nucleic Acids Res 25:4876-4882; Chenna et al. (2003). Nucleic Acids Res 31:3497-3500) with standard setting (slow alignment, similarity matrix: Gonnet, gap opening penalty 10, gap extension penalty: 0.2). Minor manual editing was done to further optimise the alignment.

[0670] A phylogenetic tree of PLPCase polypeptides (FIG. 14) was constructed by aligning PLPCase sequences using MAFFT (Katoh and Toh (2008)—Briefings in Bioinformatics 9:286-298). A neighbour-joining tree was calculated using Quick-Tree (Howe et al. (2002), Bioinformatics 18(11): 1546-7), 100 bootstrap repetitions. A circular dendrogram was drawn using Dendroscope 2.0.1 (Huson et al. (2007), BMC Bioinformatics 8(1):460). Confidence levels for 100 bootstrap repetitions are indicated for major branchings.

### Example 3: Calculation of Global Percentage Identity Between Polypeptide Sequences

[0671] Global percentages of similarity and identity between full length polypeptide sequences useful in performing the methods of the invention were determined using MatGAT (Matrix Global Alignment Tool) software (BMC Bioinformatics. 2003 4:29. MatGAT: an application that generates similarity/identity matrices using protein or DNA sequences. Campanella J J, Bitincka L, Smalley J; software hosted by Ledion Bitincka). MatGAT generates similarity/identity matrices for DNA or protein sequences without needing pre-alignment of the data. The program performs a series of pair-wise alignments using the Myers and Miller global alignment algorithm, calculates similarity and identity, and then places the results in a distance matrix.

[0672] 1. DUF642 Polypeptides

[0673] Results of an analysis for clade A are shown in FIG. 6 for the global similarity and identity over the full length of the polypeptide sequences. Sequence similarity is shown in the bottom half of the dividing line and sequence identity is shown in the top half of the diagonal dividing line. Parameters used in the comparison were: Scoring matrix: Blosum62, First Gap: 12, Extending Gap: 2. The sequence identity (in %) between the DUF642 polypeptide sequences of clade A+B useful in performing the methods of the invention can be as low as 29.7% (is generally higher than 29.7%) compared to SEQ ID NO: 2 or 4. The sequence identity (in %) between the DUF642 polypeptide sequences of clade A useful in performing the methods of the invention can be as low as 38.4% (is generally higher than 38.4%) compared to SEQ ID NO: 2 or 4.

TABLE B1
Description of proteins in FIG. 6:

```
  1. Os_DUF642.3
  2. Os_DUF642.2
  3. O. sativa_LOC_Os01g42520.1
  4. O. sativa_LOC_Os04g41710.1
  5. O. sativa_LOC_Os04g41740.1
  6. O. sativa_LOC_Os04g41750.1
  7. O. sativa_LOC_Os04g41759.1
  8. O. sativa_LOC_Os04g41770.1
  9. P. virgatum_TC46275
10. S. bicolor_Sb03g027650.1
11. S. bicolor_Sb06g021270.1
12. S. bicolor_Sb06g021280.1
13. S. bicolor_Sb06g021290.1
14. S. bicolor_Sb06g021300.1
15. S. bicolor_Sb06g021310.1
16. S. bicolor_Sb06g021320.1
17. T. aestivum_c60008104@11410
18. Z. mays_TC458850
19. Z. mays_TC468877
20. Z. mays_ZM07MC22756_BFb0088A01@22693
21. Zea_mays_GRMZM2G034985_T02
22. Zea_mays_GRMZM2G051898_T01
23. Zea_mays_GRMZM2G051912_T01
24. Zea_mays_GRMZM2G405071_T01
25. O. sativa_LOC_Os02g11040.1
26. P. virgatum_TC392
27. S. bicolor_Sb04g007160.1
28. Z. mays_TC467870
```

[0674] 2. Epimerase-Related Like Polypeptides

[0675] Results of the analysis are shown in FIG. 11 for the global similarity and identity over the full length of the polypeptide sequences. Sequence similarity is shown in the bottom half of the dividing line and sequence identity is shown in the top half of the diagonal dividing line. Parameters used in the comparison were: Scoring matrix: Blosum62, First Gap: 12, Extending Gap: 2. The sequence identity (in %) between the epimerase-related like polypeptide sequences useful in performing the methods of the invention is generally higher than 40% compared to SEQ ID NO: 198.

[0676] A MATGAT table for local alignment of a specific domain, or data on % identity/similarity between specific domains can also be made.

[0677] 3. PLPCase Polypeptides

[0678] Results of the analysis are shown in FIG. 15 for the global similarity and identity over the full length of the polypeptide sequences. Sequence similarity is shown in the bottom half of the dividing line and sequence identity is shown in the top half of the diagonal dividing line. Parameters used in the comparison were: Scoring matrix: Blosum62, First Gap: 12, Extending Gap: 2. The sequence identity (in %) between the PLPCase polypeptide sequences useful in performing the methods of the invention can be as low as 24%, but is generally higher than 24%, compared to SEQ ID NO: 285.

TABLE B2
Description of proteins in FIG. 15:

```
  1. M. truncatula_PLPCase
  2. A. thaliana_AT3G15650.1#1
  3. A. thaliana_AT1G52470.1#1
  4. G. max_Glyma13g43990.1#1
  5. G. max_Glyma08g22420.1#1
  6. G. max_Glyma07g03670.1#1
  7. A. thaliana_AT1G52700.1#1
  8. G. max_GM06MC00001_45093526@1#1
  9. P. trichocarpa_TC89207#1
10. T. aestivum_c55164328@10990#1
11. Z. mays_c58236581gm030403@14151#1
12. H. vulgare_BI948365#1
13. H. annuus_TC40709#1
14. B. napus_TC92944#1
15. B. napus_BN06MC12702_43481925@12666#1
16. A. thaliana_AT5G20060.1#1
17. B. napus_BN06MC00524_46010623@523#1
18. H. annuus_TC45565#1
19. M. truncatula_AC148176_15.5#1
20. O. sativa_LOC_Os01g07960.1#1
21. Z. mays_TC480822#1
22. P. trichocarpa_scaff_VI.1824#1
23. P. trichocarpa_809106#1
24. G. max_TC317555#1
25. G. max_Glyma04g07280.1#1
26. Z. mays_TC563901#1
27. Z. mays_ZM07MC31087_BFb0267E17@30994#1
28. T. aestivum_TC296583#1
29. Zea_mays_GRMZM2G481362_T01#1
30. O. sativa_LOC_Os01g42690.1#1
31. O. sativa_LOC_Os05g51050.1#1
32. Z. mays_ZM07MC23122_BFb0221H24@23057#1
```

[0679] As can be seen from the MatGAT table in FIG. 15, PLPCase can be separated into three clusters: Cluster A: containing PLPCase of dicot origin, Cluster B: containing PLPCase of dicot and monocot origin and Cluster C: containing PLPCase of monocot origin.

### Example 4: Identification of Domains Comprised in Polypeptide Sequences Useful in Performing the Methods of the Invention

[0680] The Integrated Resource of Protein Families, Domains and Sites (InterPro) database is an integrated interface for the commonly used signature databases for text- and sequence-based searches. The InterPro database combines these databases, which use different methodologies and varying degrees of biological information about well-characterized proteins to derive protein signatures. Collaborating databases include SWISS-PROT, PROSITE, TrEMBL, PRINTS, ProDom and Pfam, Smart and TIGRFAMs. Pfam is a large collection of multiple sequence alignments and hidden Markov models covering many common protein domains and families. Pfam is hosted at the Sanger Institute server in the United Kingdom. Interpro is hosted at the European Bioinformatics Institute in the United Kingdom.

[0681] 1. DUF642 Polypeptides

[0682] The results of the InterPro scan (InterPro database, release 4.7) of the polypeptide sequence as represented by SEQ ID NO: 2 and 4, respectively, are presented in Table C1.

TABLE C1
InterPro scan results (major accession numbers) of the polypeptide
sequence as represented by SEQ ID NO: 2 and 4.

| | | | Amino acid | Amino acid |
|---|---|---|---|---|
| | | | coordinates | coordinates |
| | | Domain | on | on |
| Interpro ID | Domain ID | name | SEQ ID NO 2 | SEQ ID NO 4 |
| IPR006946 | PF04862 | DUF642 | 51-371 | 1-292 |

[0683] In an embodiment a DUF642 polypeptide comprises a conserved domain (or motif) with at least 70%, 71%, 72%, 73%, 74%, 75%, 76%, 77%, 78%, 79%, 80%, 81%, 82%, 83%, 84%, 85%, 86%, 87%, 88%, 89%, 90%, 91%, 92%, 93%, 94%, 95%, 96%, 97%, 98%, or 99% sequence identity to a conserved domain from amino acid 51 to 371 in SEQ ID NO:2 or from amino acid 28 to 194 of SEQ ID NO: 4.

[0684] 2. Epimerase-Related Like Polypeptides

[0685] The results of the InterPro scan (InterPro database, release 30.0) of the polypeptide sequence as represented by SEQ ID NO: 198 are presented in Table C2.

TABLE C2
InterPro scan results (major accession numbers) of the polypeptide sequence as
represented by SEQ ID NO: 198.

| | | | Amino acid | | |
|---|---|---|---|---|---|
| | | | coordinates | | |
| | Accession | | on SEQ ID | E- | |
| Database | number | Accession name | NO: 198 | value | accession |
| superfamily | SSF53383 | PyrdxlP- | [32-449] | 1.2E−55 | IPR015424 |
| | | dep_Trfase_major | | | |
| | | (Pyridoxal phosphate- | | | |
| | | dependent transferase, | | | |
| | | major domain) | | | |
| HMMPanther | PTHR11601 | PTHR11601 | [47-276] | 7.89E−15 | NULL |
| HMMPfam | PF00266 | Aminotran_5 | [92-364] | 6.7E−18 | IPR000192 |
| | | (Aminotransferase, | | | |
| | | class V/Cysteine | | | |
| | | desulfurase Biological | | | |
| | | Process: metabolic | | | |
| | | process (GO: 0008152)) | | | |
| Gene3D | G3DSA: | PyrdxlP- | [59-323] | 1.09E−42 | IPR015421 |
| | 3.40.640.10 | dep_Trfase_major_sub1 | | | |
| | | (Pyridoxal phosphate- | | | |
| | | dependent transferase, | | | |
| | | major region, | | | |
| | | subdomain 1) | | | |

[0686] An epimerase-related like polypeptide according to the invention comprises a conserved domain (or motif) with at least 50%, 51%, 52%, 53%, 54%, 55%, 56%, 57%, 58%, 59%, 60%, 61%, 62%, 63%, 64%, 65%, 66%, 67%, 68%, 69%, 70%, 71%, 72%, 73%, 74%, 75%, 76%, 77%, 78%, 79%, 80%, 81%, 82%, 83%, 84%, 85%, 86%, 87%, 88%, 89%, 90%, 91%, 92%, 93%, 94%, 95%, 96%, 97%, 98%, 99% sequence identity to or consists of a conserved domain selected from any one of:
[0687] amino acid coordinates 32 to 449 in SEQ ID NO: 198;
[0688] amino acid coordinates 47 to 276 in SEQ ID NO: 198;
[0689] amino acid coordinates 92 to 364 in SEQ ID NO: 198; and
[0690] amino acid coordinates 59 to 323 in SEQ ID NO: 198.

[0691] 3. PLPCase Polypeptides

[0692] The results of the InterPro scan (InterPro database, version 4.6) of the polypeptide sequence as represented by SEQ ID NO: 285 are presented in Table C3.

TABLE C3
InterPro scan results (major accession numbers) of the polypeptide sequence as
represented by SEQ ID NO: 285.

| | | | e-value |
|---|---|---|---|
| | | | [Amino acid |
| | | | coordinates |
| | | Domain name | on SEQ ID NO |
| Database | Accession number | Short name | 285] |
| IPR003140 | PF02230 | Phospholipase/carboxylesterase | 6.2e−41 [24-248]T |
| InterPro | PFAM | Abhydrolase_2 | |
| Unintegrated | G3DSA: 3.40.50.1820 | Unintegrated | 5.3e−56 [12-250]T |
| | GENE3D | NA | |
| | PTHR10655 | Unintegrated | 1.3e−94 [60-254]T |
| | PANTHER | LYSOPHOSPHOLIPASE- | |
| | | RELATED | |
| | PTHR10655: SF5 | Unintegrated | 1.3e−94 [60-254]T |
| | PANTHER | LYSOPHOSPHOLIPASE- | |
| | | RELATED | |
| | SSF53474 | Unintegrated | 2e−42 [21-251]T |
| | SUPERFAMILY | alpha/beta-Hydrolases | |

[0693] In an embodiment a PLPCase polypeptide comprises a conserved domain or motif with at least 70%, 71%, 72%, 73%, 74%, 75%, 76%, 77%, 78%, 79%, 80%, 81%, 82%, 83%, 84%, 85%, 86%, 87%, 88%, 89%, 90%, 91%, 92%, 93%, 94%, 95%, 96%, 97%, 98%, or 99% sequence identity to a conserved domain from amino acid 24 to 248 in SEQ ID NO: 285.

### Example 5: Topology Prediction of the Polypeptide Sequences Useful in Performing the Methods of Invention

[0694] TargetP 1.1 predicts the subcellular location of eukaryotic proteins. The location assignment is based on the predicted presence of any of the N-terminal pre-sequences: chloroplast transit peptide (cTP), mitochondrial targeting peptide (mTP) or secretory pathway signal peptide (SP). Scores on which the final prediction is based are not really probabilities, and they do not necessarily add to one. However, the location with the highest score is the most likely according to TargetP, and the relationship between the scores (the reliability class) may be an indication of how certain the prediction is. The reliability class (RC) ranges from 1 to 5, where 1 indicates the strongest prediction. For the sequences predicted to contain an N-terminal presequence a potential cleavage site can also be predicted. TargetP is maintained at the server of the Technical University of Denmark.

[0695] A number of parameters must be selected before analysing a sequence, such as organism group (non-plant or plant), cutoff sets (none, predefined set of cutoffs, or user-specified set of cutoffs), and the calculation of prediction of cleavage sites (yes or no).

[0696] Many other algorithms can be used to perform such analyses, including:
[0697] ChloroP 1.1 hosted on the server of the Technical University of Denmark;
[0698] Protein Prowler Subcellular Localisation Predictor version 1.2 hosted on the server of the Institute for Molecular Bioscience, University of Queensland, Brisbane, Australia;
[0699] PENCE Proteome Analyst PA-GOSUB 2.5 hosted on the server of the University of Alberta, Edmonton, Alberta, Canada;
[0700] TMHMM, hosted on the server of the Technical University of Denmark
[0701] PSORT (URL: psort.org)
[0702] PLOC (Park and Kanehisa, Bioinformatics, 19, 1656-1663, 2003).

### Example 6: Cloning of the Nucleic Acid Sequence Used in Methods of the Invention

[0703] 1. DUF642 Polypeptides

[0704] The nucleic acid sequence was amplified by PCR using as template a custom-made Oryza sativa seedlings cDNA library. PCR was performed using a commercially available proofreading Taq DNA polymerase in standard conditions, using 200 ng of template in a 50 μl PCR mix.

[0705] In a first experiment A, the primers used were prm16414 (SEQ ID NO: 190; sense): 5′-ggggacaagtttgtacaaaaaagcaggcttaaacaatgagaagaaaaacagagatg-3′ and prm16415 (SEQ ID NO: 191; reverse, complementary): 5′-ggggaccactttgtacaagaaagctgggtataatattacagaaggaaccg-3′, which include the AttB sites for Gateway recombination.

[0706] In a second experiment B, the primers used were prm16412 (SEQ ID NO: 192; sense): 5′-ggggacaagtttgtacaaaaaagcaggcttaaacaatggtgctggtggtccc-3′ and prm16413 (SEQ ID NO: 193; reverse, complementary): 5′-ggggaccactttgtacaagaaagctgggttagtacgacatcgcggca-3′, which include the AttB sites for Gateway recombination.

[0707] The amplified PCR fragment was purified also using standard methods. The first step of the Gateway procedure, the BP reaction, was then performed, during which the PCR fragment recombined in vivo with the pDONR201 plasmid to produce, according to the Gateway terminology, an “entry clone”, pDUF642. Plasmid pDONR201 was purchased from Invitrogen, as part of the Gateway® technology.

[0708] In the first experiment A, the entry clone comprising SEQ ID NO: 1 was then used in an LR reaction with a destination vector used for Oryza sativa transformation. This vector contained as functional elements within the T-DNA borders: a plant selectable marker; a screenable marker expression cassette; and a Gateway cassette intended for LR in vivo recombination with the nucleic acid sequence of interest already cloned in the entry clone. A rice GOS2 promoter (SEQ ID NO: 189) for constitutive expression was located upstream of this Gateway cassette.

[0709] In the second experiment B, the entry clone comprising SEQ ID NO: 3 was then used in an LR reaction with a destination vector used for Oryza sativa transformation. This vector contained as functional elements within the T-DNA borders: a plant selectable marker; a screenable marker expression cassette; and a Gateway cassette intended for LR in vivo recombination with the nucleic acid sequence of interest already cloned in the entry clone. A rice GOS2 promoter (SEQ ID NO: 189) for constitutive expression was located upstream of this Gateway cassette.

[0710] In a further experiment, all steps as described above were executed for the cloning of SEQ ID NO: 159. Primers used were prm13182 (SEQ ID NO: 195; sense): 5′-ggggacaagtttgtacaaaaaagcaggcttaaacaatgtttcaaagct caacaaga-3′ and prm13183 (SEQ ID NO: 196; reverse, complementary): 5′-ggggaccactttgta caagaaagctgggtctctttctccccattcaaac 3′, which include the AttB sites for Gateway recombination.

[0711] The entry clone comprising SEQ ID NO: 159 was then used in an LR reaction with a destination vector used for Oryza sativa transformation. This vector contained as functional elements within the T-DNA borders: a plant selectable marker; a screenable marker expression cassette; and a Gateway cassette intended for LR in vivo recombination with the nucleic acid sequence of interest already cloned in the entry clone. A rice GOS2 promoter (SEQ ID NO: 189) for constitutive expression was located upstream of this Gateway cassette.

[0712] After the LR recombination step, the resulting expression vectors pGOS2::DUF642 (FIG. 7) were transformed into Agrobacterium strain LBA4044 according to methods well known in the art.

[0713] 2. Epimerase-Related Like Polypeptides

[0714] The nucleic acid sequence was amplified by PCR using as template a custom-made Populus trichocarpa seedlings cDNA library. PCR was performed using a commercially available proofreading Taq DNA polymerase in standard conditions, using 200 ng of template in a 50 μl PCR mix. The primers used were prm18733 (SEQ ID NO: 276; sense, start codon in bold): 5′ ggggacaagtttgtacaaaaaagcaggcttaaacaatgcaagaaaactccaaagat 3′ and prm18734 (SEQ ID NO: 277; reverse, complementary): 5′ ggggaccactttgtacaagaaagctg ggtgcataccttctcactctggat 3′, which include the AttB sites for Gateway recombination. The amplified PCR fragment was purified also using standard methods. The first step of the Gateway procedure, the BP reaction, was then performed, during which the PCR fragment recombined in vivo with the pDONR201 plasmid to produce, according to the Gateway terminology, an “entry clone”, pERL (“ERL” stands for “epimerase-related like”). Plasmid pDONR201 was purchased from Invitrogen, as part of the Gateway® technology.

[0715] The entry clone comprising SEQ ID NO: 197 was then used in an LR reaction with a destination vector used for Oryza sativa transformation. This vector contained as functional elements within the T-DNA borders: a plant selectable marker; a screenable marker expression cassette; and a Gateway cassette intended for LR in vivo recombination with the nucleic acid sequence of interest already cloned in the entry clone. A rice GOS2 promoter (SEQ ID NO: 278) for constitutive expression was located upstream of this Gateway cassette.

[0716] After the LR recombination step, the resulting expression vector pGOS2::ERL (FIG. 12) was transformed into Agrobacterium strain LBA4044 according to methods well known in the art.

[0717] 3. PLPCase Polypeptides

[0718] The nucleic acid sequence was amplified by PCR using as template a custom-made Medicago truncatula seedlings cDNA library. PCR was performed using a commercially available proofreading Taq DNA polymerase in standard conditions, using 200 ng of template in a 50 μl PCR mix. The primers used were prm15409 (SEQ ID NO: 362; sense, start codon in bold): 5′-ggggacaagtttgtacaaaaaagcaggcttaaacaatgagtcacgcgcattctc-3′ and prm15410 (SEQ ID NO: 363; reverse, complementary): 5′-ggggaccactttgtacaagaaa gctgggtaa aatagttttgtcatttacgacg-3′, which include the AttB sites for Gateway recombination. The amplified PCR fragment was purified also using standard methods. The first step of the Gateway procedure, the BP reaction, was then performed, during which the PCR fragment recombined in vivo with the pDONR201 plasmid to produce, according to the Gateway terminology, an “entry clone”, pPLPCase. Plasmid pDONR201 was purchased from Invitrogen, as part of the Gateway® technology.

[0719] The entry clone comprising SEQ ID NO: 284 was then used in an LR reaction with a destination vector used for Oryza sativa transformation. This vector contained as functional elements within the T-DNA borders: a plant selectable marker; a screenable marker expression cassette; and a Gateway cassette intended for LR in vivo recombination with the nucleic acid sequence of interest already cloned in the entry clone. A rice GOS2 promoter (SEQ ID NO: 361) for constitutive expression was located upstream of this Gateway cassette.

[0720] After the LR recombination step, the resulting expression vector pGOS2::PLPCase (FIG. 16) was transformed into Agrobacterium strain LBA4044 according to methods well known in the art.

[0721] In the same way an expression vector comprising SEQ ID NO: 286 was prepared using primers prm15411 (SEQ ID NO: 364, sense): 5′-ggggacaagtttgtacaaaaaagcaggcttaaacaa tgagctattctcgtcaaagc-3′ and prm15412 (SEQ ID NO: 365; reverse, complementary): 5′-ggggaccactttgtacaagaaagctgggttgctgagaagatgcttgtaaa-3′.

### Example 7: Plant Transformation

[0722] Rice Transformation

[0723] The Agrobacterium containing the expression vector was used to transform Oryza sativa plants. Mature dry seeds of the rice japonica cultivar Nipponbare were dehusked. Sterilization was carried out by incubating for one minute in 70% ethanol, followed by 30 to 60 minutes, preferably 30 minutes in sodium hypochlorite solution (depending on the grade of contamination), followed by a 3 to 6 times, preferably 4 time wash with sterile distilled water. The sterile seeds were then germinated on a medium containing 2,4-D (callus induction medium). After incubation in light for 6 days scutellum-derived calli is transformed with Agrobacterium as described herein below. Alternatively, the incubation step in ethanol was followed by a 30 minutes incubation in 0.2% HgCl₂, followed by a 6 times 15 minutes wash with sterile distilled water. The sterile seeds were then germinated on a medium containing 2,4-D (callus induction medium). After incubation in the dark for four weeks, embryogenic, scutellum-derived calli were excised and propagated on the same medium. After two weeks, the calli were multiplied or propagated by subculture on the same medium for another 2 weeks. Embryogenic callus pieces were sub-cultured on fresh medium 3 days before co-cultivation (to boost cell division activity).

[0724] Agrobacterium strain LBA4404 containing the expression vector was used for co-cultivation. Agrobacterium was inoculated on AB medium with the appropriate antibiotics and cultured for 3 days at 28° C. The bacteria were then collected and suspended in liquid co-cultivation medium to a density (OD₆₀₀) of about 1. The calli were immersed in the suspension for 1 to 15 minutes. The callus tissues were then blotted dry on a filter paper and transferred to solidified, co-cultivation medium and incubated for 3 days in the dark at 25° C. After washing away the Agrobacterium, the calli were grown on 2,4-D-containing medium for 10 to 14 days (growth time for indica: 3 weeks) under light at 28° C.-32° C. in the presence of a selection agent. Alternatively co-cultivated calli were grown on 2,4-D-containing medium for 4 weeks in the dark at 28° C. in the presence of a selection agent. During this period, rapidly growing resistant callus developed. After transfer of this material to regeneration media, the embryogenic potential was released and shoots developed in the next four to six weeks. Shoots were excised from the calli and incubated for 2 to 3 weeks on an auxin-containing medium from which they were transferred to soil. Hardened shoots were grown under high humidity and short days in a greenhouse.

[0725] Transformation of rice cultivar indica can also be done in a similar way as give above according to techniques well known to a skilled person.

[0726] Approximately 35 to 90 independent T0 rice transformants were generated for one construct. The primary transformants were transferred from a tissue culture chamber to a greenhouse. After a quantitative PCR analysis to verify copy number of the T-DNA insert, only single copy transgenic plants that exhibit tolerance to the selection agent were kept for harvest of T1 seed. Seeds were then harvested three to five months after transplanting. The method yielded single locus transformants at a rate of over 50% (Aldemita and Hodges 1996, Chan et al. 1993, Hiei et al. 1994).

### Example 8: Transformation of Other Crops

[0727] Corn Transformation

[0728] Transformation of maize (Zea mays) is performed with a modification of the method described by Ishida et al. (1996) Nature Biotech 14(6): 745-50. Transformation is genotype-dependent in corn and only specific genotypes are amenable to transformation and regeneration. The inbred line A188 (University of Minnesota) or hybrids with A188 as a parent are good sources of donor material for transformation, but other genotypes can be used successfully as well. Ears are harvested from corn plant approximately 11 days after pollination (DAP) when the length of the immature embryo is about 1 to 1.2 mm. Immature embryos are cocultivated with Agrobacterium tumefaciens containing the expression vector, and transgenic plants are recovered through organogenesis. Excised embryos are grown on callus induction medium, then maize regeneration medium, containing the selection agent (for example imidazolinone but various selection markers can be used). The Petri plates are incubated in the light at 25° C. for 2-3 weeks, or until shoots develop. The green shoots are transferred from each embryo to maize rooting medium and incubated at 25° C. for 2-3 weeks, until roots develop. The rooted shoots are transplanted to soil in the greenhouse. T1 seeds are produced from plants that exhibit tolerance to the selection agent and that contain a single copy of the T-DNA insert.

[0729] Wheat Transformation

[0730] Transformation of wheat is performed with the method described by Ishida et al. (1996) Nature Biotech 14(6): 745-50. The cultivar Bobwhite (available from CIMMYT, Mexico) is commonly used in transformation. Immature embryos are co-cultivated with Agrobacterium tumefaciens containing the expression vector, and transgenic plants are recovered through organogenesis. After incubation with Agrobacterium, the embryos are grown in vitro on callus induction medium, then regeneration medium, containing the selection agent (for example imidazolinone but various selection markers can be used). The Petri plates are incubated in the light at 25° C. for 2-3 weeks, or until shoots develop. The green shoots are transferred from each embryo to rooting medium and incubated at 25° C. for 2-3 weeks, until roots develop. The rooted shoots are transplanted to soil in the greenhouse. T1 seeds are produced from plants that exhibit tolerance to the selection agent and that contain a single copy of the T-DNA insert.

[0731] Soybean Transformation

[0732] Soybean is transformed according to a modification of the method described in the Texas A&M patent U.S. Pat. No. 5,164,310. Several commercial soybean varieties are amenable to transformation by this method. The cultivar Jack (available from the Illinois Seed foundation) is commonly used for transformation. Soybean seeds are sterilised for in vitro sowing. The hypocotyl, the radicle and one cotyledon are excised from seven-day old young seedlings. The epicotyl and the remaining cotyledon are further grown to develop axillary nodes. These axillary nodes are excised and incubated with Agrobacterium tumefaciens containing the expression vector. After the cocultivation treatment, the explants are washed and transferred to selection media. Regenerated shoots are excised and placed on a shoot elongation medium. Shoots no longer than 1 cm are placed on rooting medium until roots develop. The rooted shoots are transplanted to soil in the greenhouse. T1 seeds are produced from plants that exhibit tolerance to the selection agent and that contain a single copy of the T-DNA insert.

[0733] Rapeseed/Canola Transformation

[0734] Cotyledonary petioles and hypocotyls of 5-6 day old young seedling are used as explants for tissue culture and transformed according to Babic et al. (1998, Plant Cell Rep 17: 183-188). The commercial cultivar Westar (Agriculture Canada) is the standard variety used for transformation, but other varieties can also be used. Canola seeds are surface-sterilized for in vitro sowing. The cotyledon petiole explants with the cotyledon attached are excised from the in vitro seedlings, and inoculated with Agrobacterium (containing the expression vector) by dipping the cut end of the petiole explant into the bacterial suspension. The explants are then cultured for 2 days on MSBAP-3 medium containing 3 mg/l BAP, 3% sucrose, 0.7% Phytagar at 23° C., 16 hr light. After two days of co-cultivation with Agrobacterium, the petiole explants are transferred to MSBAP-3 medium containing 3 mg/l BAP, cefotaxime, carbenicillin, or timentin (300 mg/l) for 7 days, and then cultured on MSBAP-3 medium with cefotaxime, carbenicillin, or timentin and selection agent until shoot regeneration. When the shoots are 5-10 mm in length, they are cut and transferred to shoot elongation medium (MSBAP-0.5, containing 0.5 mg/l BAP). Shoots of about 2 cm in length are transferred to the rooting medium (MSO) for root induction. The rooted shoots are transplanted to soil in the greenhouse. T1 seeds are produced from plants that exhibit tolerance to the selection agent and that contain a single copy of the T-DNA insert.

[0735] Alfalfa Transformation

[0736] A regenerating clone of alfalfa (Medicago sativa) is transformed using the method of (McKersie et al., 1999 Plant Physiol 119: 839-847). Regeneration and transformation of alfalfa is genotype dependent and therefore a regenerating plant is required. Methods to obtain regenerating plants have been described. For example, these can be selected from the cultivar Rangelander (Agriculture Canada) or any other commercial alfalfa variety as described by Brown D C W and A Atanassov (1985. Plant Cell Tissue Organ Culture 4: 111-112). Alternatively, the RA3 variety (University of Wisconsin) has been selected for use in tissue culture (Walker et al., 1978 Am J Bot 65:654-659). Petiole explants are cocultivated with an overnight culture of Agrobacterium tumefaciens C58C1 pMP90 (McKersie et al., 1999 Plant Physiol 119: 839-847) or LBA4404 containing the expression vector. The explants are cocultivated for 3 d in the dark on SH induction medium containing 288 mg/L Pro, 53 mg/L thioproline, 4.35 g/L K2SO4, and 100 μm acetosyringinone. The explants are washed in half-strength Murashige-Skoog medium (Murashige and Skoog, 1962) and plated on the same SH induction medium without acetosyringinone but with a suitable selection agent and suitable antibiotic to inhibit Agrobacterium growth. After several weeks, somatic embryos are transferred to BOi2Y development medium containing no growth regulators, no antibiotics, and 50 g/L sucrose. Somatic embryos are subsequently germinated on half-strength Murashige-Skoog medium. Rooted seedlings were transplanted into pots and grown in a greenhouse. T1 seeds are produced from plants that exhibit tolerance to the selection agent and that contain a single copy of the T-DNA insert.

[0737] Cotton Transformation

[0738] Cotton is transformed using Agrobacterium tumefaciens according to the method described in U.S. Pat. No. 5,159,135. Cotton seeds are surface sterilised in 3% sodium hypochlorite solution during 20 minutes and washed in distilled water with 500 μg/ml cefotaxime. The seeds are then transferred to SH-medium with 50 μg/ml benomyl for germination. Hypocotyls of 4 to 6 days old seedlings are removed, cut into 0.5 cm pieces and are placed on 0.8% agar. An Agrobacterium suspension (approx. 108 cells per ml, diluted from an overnight culture transformed with the gene of interest and suitable selection markers) is used for inoculation of the hypocotyl explants. After 3 days at room temperature and lighting, the tissues are transferred to a solid medium (1.6 g/l Gelrite) with Murashige and Skoog salts with B5 vitamins (Gamborg et al., Exp. Cell Res. 50:151-158 (1968)), 0.1 mg/l 2,4-D, 0.1 mg/l 6-furfurylaminopurine and 750 μg/ml MgCL2, and with 50 to 100 μg/ml cefotaxime and 400-500 μg/mlcarbenicillin to kill residual bacteria. Individual cell lines are isolated after two to three months (with subcultures every four to six weeks) and are further cultivated on selective medium for tissue amplification (30° C., 16 hr photoperiod). Transformed tissues are subsequently further cultivated on non-selective medium during 2 to 3 months to give rise to somatic embryos. Healthy looking embryos of at least 4 mm length are transferred to tubes with SH medium in fine vermiculite, supplemented with 0.1 mg/l indole acetic acid, 6 furfurylaminopurine and gibberellic acid. The embryos are cultivated at 30° C. with a photoperiod of 16 hrs, and plantlets at the 2 to 3 leaf stage are transferred to pots with vermiculite and nutrients. The plants are hardened and subsequently moved to the greenhouse for further cultivation.

[0739] Sugarbeet Transformation

[0740] Seeds of sugarbeet (Beta vulgaris L.) are sterilized in 70% ethanol for one minute followed by 20 min. shaking in 20% Hypochlorite bleach e.g. Clorox® regular bleach (commercially available from Clorox, 1221 Broadway, Oakland, Calif. 94612, USA). Seeds are rinsed with sterile water and air dried followed by plating onto germinating medium (Murashige and Skoog (MS) based medium (Murashige, T., and Skoog, 1962. Physiol. Plant, vol. 15, 473-497) including B5 vitamins (Gamborg et al.; Exp. Cell Res., vol. 50, 151-8.) supplemented with 10 g/l sucrose and 0.8% agar). Hypocotyl tissue is used essentially for the initiation of shoot cultures according to Hussey and Hepher (Hussey, G., and Hepher, A., 1978. Annals of Botany, 42, 477-9) and are maintained on MS based medium supplemented with 30 g/l sucrose plus 0.25 mg/l benzylamino purine and 0.75% agar, pH 5.8 at 23-25° C. with a 16-hour photoperiod. Agrobacterium tumefaciens strain carrying a binary plasmid harbouring a selectable marker gene, for example nptll, is used in transformation experiments. One day before transformation, a liquid LB culture including antibiotics is grown on a shaker (28° C., 150 rpm) until an optical density (O.D.) at 600 nm of −1 is reached. Overnight-grown bacterial cultures are centrifuged and resuspended in inoculation medium (O.D.˜1) including Acetosyringone, pH 5.5. Shoot base tissue is cut into slices (1.0 cm×1.0 cm×2.0 mm approximately). Tissue is immersed for 30s in liquid bacterial inoculation medium. Excess liquid is removed by filter paper blotting. Co-cultivation occurred for 24-72 hours on MS based medium incl. 30 g/l sucrose followed by a non-selective period including MS based medium, 30 g/l sucrose with 1 mg/l BAP to induce shoot development and cefotaxim for eliminating the Agrobacterium. After 3-10 days explants are transferred to similar selective medium harbouring for example kanamycin or G418 (50-100 mg/l genotype dependent). Tissues are transferred to fresh medium every 2-3 weeks to maintain selection pressure. The very rapid initiation of shoots (after 3-4 days) indicates regeneration of existing meristems rather than organogenesis of newly developed transgenic meristems. Small shoots are transferred after several rounds of subculture to root induction medium containing 5 mg/l NAA and kanamycin or G418. Additional steps are taken to reduce the potential of generating transformed plants that are chimeric (partially transgenic). Tissue samples from regenerated shoots are used for DNA analysis. Other transformation methods for sugarbeet are known in the art, for example those by Linsey & Gallois (Linsey, K., and Gallois, P., 1990. Journal of Experimental Botany; vol. 41, No. 226; 529-36) or the methods published in the international application published as WO9623891A.

[0741] Sugarcane Transformation

[0742] Spindles are isolated from 6-month-old field grown sugarcane plants (Arencibia et al., 1998. Transgenic Research, vol. 7, 213-22; Enriquez-Obregon et al., 1998. Planta, vol. 206, 20-27). Material is sterilized by immersion in a 20% Hypochlorite bleach e.g. Clorox® regular bleach (commercially available from Clorox, 1221 Broadway, Oakland, Calif. 94612, USA) for 20 minutes. Transverse sections around 0.5 cm are placed on the medium in the top-up direction. Plant material is cultivated for 4 weeks on MS (Murashige, T., and Skoog, 1962. Physiol. Plant, vol. 15, 473-497) based medium incl. B5 vitamins (Gamborg, O., et al., 1968. Exp. Cell Res., vol. 50, 151-8) supplemented with 20 g/l sucrose, 500 mg/l casein hydrolysate, 0.8% agar and 5 mg/l 2,4-D at 23° C. in the dark. Cultures are transferred after 4 weeks onto identical fresh medium. Agrobacterium tumefaciens strain carrying a binary plasmid harbouring a selectable marker gene, for example hpt, is used in transformation experiments. One day before transformation, a liquid LB culture including antibiotics is grown on a shaker (28° C., 150 rpm) until an optical density (O.D.) at 600 nm of −0.6 is reached. Overnight-grown bacterial cultures are centrifuged and resuspended in MS based inoculation medium (O.D.˜0.4) including acetosyringone, pH 5.5. Sugarcane embryogenic callus pieces (2-4 mm) are isolated based on morphological characteristics as compact structure and yellow colour and dried for 20 min. in the flow hood followed by immersion in a liquid bacterial inoculation medium for 10-20 minutes. Excess liquid is removed by filter paper blotting. Co-cultivation occurred for 3-5 days in the dark on filter paper which is placed on top of MS based medium incl. B5 vitamins containing 1 mg/l 2,4-D. After co-cultivation calli are washed with sterile water followed by a non-selective cultivation period on similar medium containing 500 mg/l cefotaxime for eliminating remaining Agrobacterium cells. After 3-10 days explants are transferred to MS based selective medium incl. B5 vitamins containing 1 mg/l 2,4-D for another 3 weeks harbouring 25 mg/l of hygromycin (genotype dependent). All treatments are made at 23° C. under dark conditions. Resistant calli are further cultivated on medium lacking 2,4-D including 1 mg/l BA and 25 mg/l hygromycin under 16 h light photoperiod resulting in the development of shoot structures. Shoots are isolated and cultivated on selective rooting medium (MS based including, 20 g/l sucrose, 20 mg/l hygromycin and 500 mg/l cefotaxime). Tissue samples from regenerated shoots are used for DNA analysis. Other transformation methods for sugarcane are known in the art, for example from the in-ternational application published as WO2010/151634A and the granted European patent EP1831378.

### Example 9: Phenotypic Evaluation Procedure

[0743] 9.1 Evaluation Setup

[0744] 35 to 90 independent T0 rice transformants were generated. The primary transformants were transferred from a tissue culture chamber to a greenhouse for growing and harvest of Ti seed. Six events, of which the Ti progeny segregated 3:1 for presence/absence of the transgene, were retained. For each of these events, approximately 10 T1 seedlings containing the transgene (hetero- and homo-zygotes) and approximately 10 T1 seedlings lacking the transgene (nullizygotes) were selected by monitoring visual marker expression. The transgenic plants and the corresponding nullizygotes were grown side-by-side at random positions. Greenhouse conditions were of shorts days (12 hours light), 28° C. in the light and 22° C. in the dark, and a relative humidity of 70%. Plants grown under non-stress conditions were watered at regular intervals to ensure that water and nutrients were not limiting and to satisfy plant needs to complete growth and development, unless they were used in a stress screen.

[0745] From the stage of sowing until the stage of maturity the plants were passed several times through a digital imaging cabinet. At each time point digital images (2048×1536 pixels, 16 million colours) were taken of each plant from at least 6 different angles.

[0746] T1 events can be further evaluated in the T2 generation following the same evaluation procedure as for the T1 generation, e.g. with less events and/or with more individuals per event.

[0747] Drought Screen

[0748] T1 or T2 plants were grown in potting soil under normal conditions until they approached the heading stage. They were then transferred to a “dry” section where irrigation was withheld. Soil moisture probes were inserted in randomly chosen pots to monitor the soil water content (SWC). When SWC went below certain thresholds, the plants were automatically re-watered continuously until a normal level was reached again. The plants were then re-transferred again to normal conditions. The rest of the cultivation (plant maturation, seed harvest) was the same as for plants not grown under abiotic stress conditions. Growth and yield parameters were recorded as detailed for growth under normal conditions.

[0749] Nitrogen Use Efficiency Screen

[0750] T1 or T2 plants were grown in potting soil under normal conditions except for the nutrient solution. The pots were watered from transplantation to maturation with a specific nutrient solution containing reduced N nitrogen (N) content, usually between 7 to 8 times less. The rest of the cultivation (plant maturation, seed harvest) was the same as for plants not grown under abiotic stress. Growth and yield parameters were recorded as detailed for growth under normal conditions.

[0751] Salt Stress Screen

[0752] T1 or T2 plants are grown on a substrate made of coco fibers and particles of baked clay (Argex) (3 to 1 ratio). A normal nutrient solution is used during the first two weeks after transplanting the plantlets in the greenhouse. After the first two weeks, 25 mM of salt (NaCl) is added to the nutrient solution, until the plants are harvested. Growth and yield parameters are recorded as detailed for growth under normal conditions.

[0753] 9.2 Statistical Analysis: F Test

[0754] A two factor ANOVA (analysis of variants) was used as a statistical model for the overall evaluation of plant phenotypic characteristics. An F test was carried out on all the parameters measured of all the plants of all the events transformed with the gene of the present invention. The F test was carried out to check for an effect of the gene over all the transformation events and to verify for an overall effect of the gene, also known as a global gene effect. The threshold for significance for a true global gene effect was set at a 5% probability level for the F test. A significant F test value points to a gene effect, meaning that it is not only the mere presence or position of the gene that is causing the differences in phenotype.

[0755] When two experiments with overlapping events are carried out, a combined analysis is performed. This is useful to check consistency of the effects over the two experiments, and if this is the case, to accumulate evidence from both experiments in order to increase confidence in the conclusion. The method used is a mixed-model approach that takes into account the multilevel structure of the data (i.e. experiment—event—segregants). P values are obtained by comparing likelihood ratio test to chi square distributions.

[0756] 9.3 Parameters Measured

[0757] From the stage of sowing until the stage of maturity the plants were passed several times through a digital imaging cabinet. At each time point digital images (2048×1536 pixels, 16 million colours) were taken of each plant from at least 6 different angles as described in WO2010/031780. These measurements were used to determine different parameters.

[0758] Biomass-Related Parameter Measurement

[0759] The plant aboveground area (or leafy biomass) (“AreaMax”) was determined by counting the total number of pixels on the digital images from aboveground plant parts discriminated from the background. This value was averaged for the pictures taken on the same time point from the different angles and was converted to a physical surface value expressed in square mm by calibration. Experiments show that the aboveground plant area measured this way correlates with the biomass of plant parts above ground. The above ground area is the area measured at the time point at which the plant had reached its maximal leafy biomass.

[0760] Increase in root biomass is expressed as an increase in total root biomass (“rootMax”) (measured as maximum biomass of roots observed during the lifespan of a plant); or as an increase in the root/shoot index (“RootShlnd”), measured as the ratio between root mass and shoot mass in the period of active growth of root and shoot. In other words, the root/shoot index is defined as the ratio of the rapidity of root growth to the rapidity of shoot growth in the period of active growth of root and shoot. Root biomass can be determined using a method as described in WO 2006/029987.

[0761] Parameters Related to Development Time

[0762] The early vigour is the plant aboveground area three weeks post-germination. Early vigour was determined by counting the total number of pixels from aboveground plant parts discriminated from the background. This value was averaged for the pictures taken on the same time point from different angles and was converted to a physical surface value expressed in square mm by calibration.

[0763] AreaEmer is an indication of quick early development when this value is decreased compared to control plants. It is the ratio (expressed in %) between the time a plant needs to make 30% of the final biomass and the time needs to make 90% of its final biomass.

[0764] The “time to flower” or “flowering time” (“TimetoFlower”) of the plant can be determined using the method as described in WO 2007/093444.

[0765] Seed-Related Parameter Measurements

[0766] The mature primary panicles were harvested, counted, bagged, barcode-labelled and then dried for three days in an oven at 37° C. The panicles were then threshed and all the seeds were collected and counted. The seeds are usually covered by a dry outer covering, the husk. The filled husks (herein also named filled florets) were separated from the empty ones using an air-blowing device. The empty husks were discarded and the remaining fraction was counted again. The filled husks were weighed on an analytical balance.

[0767] The total number of seeds was determined by counting the number of filled husks that remained after the separation step. The total seed weight was measured by weighing all filled husks harvested from a plant.

[0768] The total seed weight (“totalwgseeds”) was measured by weighing all filled husks harvested from a plant.

[0769] The total number of seeds (or florets=“nrtotalseeds”) per plant was determined by counting the number of husks (whether filled or not) harvested from a plant.

[0770] Thousand Kernel Weight (TKW) is extrapolated from the number of seeds counted and their total weight (“totalwgseeds/nrfilledseeds*1000”).

[0771] The Harvest Index (HI) in the present invention is defined as the ratio between the total seed weight and the above ground area (mm²) (=“totalwgseeds/AreaMax), multiplied by a factor 10⁶.

[0772] The number of flowers per panicle (“flowerperpan”) as defined in the present invention is the ratio between the total number of seeds over the number of mature primary panicles (=“nrtotalseeds/firstpan” and “firstpan”=number of panicles in the first flush).

[0773] The “seed fill rate” or “seed filling rate” as defined in the present invention is the proportion (expressed as a %) of the number of filled seeds (i.e. florets containing seeds=“nrfilledseeds”) over the total number of seeds (i.e. total number of florets=“nrtotalseed”). In other words, the seed filling rate is the percentage of florets that are filled with seed.

### Example 10: Results of the Phenotypic Evaluation of the Transgenic Plants

[0774] 1. DUF642 Polypeptides

[0775] The results of the evaluation of transgenic rice plants expressing a DUF642 nucleic acid under non-stress conditions are presented below.

[0776] In the first experiment A using SEQ ID NO: 1, an increase of at least 5% was observed for total seed yield (Totalwgseeds), number of seeds (nrfilledseed), seed fill rate (fillrate) and harvest index.

[0777] The results of the evaluation of transgenic rice plants in the T1 generation and expressing a nucleic acid encoding the DUF642 polypeptide of SEQ ID NO: 2 under non-stress condi-tions are presented below in Table D1. When grown under non-stress conditions, an in-crease of at least 5% was observed for total seed yield (Totalwgseeds), number of seeds (nrfilledseed), seed fill rate (filtrate) and harvest index. Moreover, two lines showed an in-crease in aboveground biomass (AreaMax), and one line showed an increase of Maximum height of the gravity center of the leafy biomass (GravityYMax).

TABLE D1
Data summary for transgenic rice plants; for each parameter, the
overall percent increase is shown for the T1 generation), for each
parameter the p-value is <0.05.

| Parameter | Overall increase |
|---|---|
| totalwgseeds | 16.5 |
| nrfilledseed | 15.8 |
| fillrate | 14.1 |
| harvestindex | 15.0 |

[0778] In the second experiment B using SEQ ID NO: 3, an increase of at least 5% was observed for total seed yield (Totalwgseeds), seed fill rate (filtrate) and greenness before flowering.

[0779] The results of the evaluation of transgenic rice plants in the T1 generation and expressing a nucleic acid encoding the DUF642 polypeptide of SEQ ID NO: 4 under non-stress condi-tions are presented below in Table D2. When grown under non-stress conditions, an in-crease of at least 5% was observed for total seed yield (Totalwgseeds), seed fill rate (fill-rate) and greenness before flowering. Moreover, two lines showed an increase in above-ground biomass (AreaMax), Height of the highest tip of the plant (HeightMax) and Maximum height of the gravity center of the leafy biomass (GravityYMax).

TABLE D2
Data summary for transgenic rice plants; for each parameter, the
overall percent increase is shown for the T1 generation, for each
parameter the p-value is <0.05.

| Parameter | Overall increase |
|---|---|
| totalwgseeds | 7.2 |
| fillrate | 8.8 |
| Greenness before flowering | 3.8 |

[0780] In a further experiment, SEQ ID NO: 159 (in clade B) was used instead of SEQ ID NO: 1 in a drought screen as described above. The results of the evaluation of transgenic rice plants in the T1 generation and expressing a nucleic acid encoding the DUF642 polypeptide of SEQ ID NO: 160 under drought conditions showed an increase of at least 5% total number of seeds (nrtotalseed) and for aboveground biomass (AreaMax).

[0781] In yet another experiment, rice plants transformed with SEQ ID NO: 173 under control of the rice GOS2 promoter were used in a nitrogen use efficiency screen described above. The transgenic rice plants showed an increased fillrate compared to the control plants (overall increase for the 6 tested T1 lines was 10%, p<0.05).

[0782] 2. Epimerase-Related Like Polypeptides

[0783] The results of the evaluation of transgenic rice plants of the T1 generation expressing the nucleic acid encoding an epimerase-related like polypeptide of SEQ ID NO: 198 under non-stress conditions are presented below in Table D3.

[0784] When grown under non-stress conditions, an increase of at least 5% was observed for parameters such as seed yield, including total weight of seeds (totalwgseeds), harvest index, and fill rate.

TABLE D3
Data summary for transgenic rice plants; for each parameter, the
overall percent increase is shown for the plants of the T1 generation
as compared to control plants, for each parameter the p-value is <0.05.

| Parameter | Overall increase |
|---|---|
| totalwgseeds | 8.6 |
| fillrate | 5.6 |
| harvestindex | 6.9 |

[0785] In addition, it could be noted that transgenic rice plants of at least one event showed an increase of at least 3% for the parameter thousand kernel weight (TKW) as compared to control plants.

[0786] Transgenic rice plants of at least two events showed an increase of at least 5% (and in particular on average 8 and 11% increase, respectively) in biomass, particularly above ground biomass (AreaMax), as compared to control plants.

[0787] Furthermore, there was a clear tendency for transgenic plants of at least four events to have an increase of at least 5% in number of filled seeds (nrfilledseed) as compared to control plants.

[0788] 3. PLPCase Polypeptides

[0789] The results of the evaluation of transgenic rice plants in the T1 generation and expressing a nucleic acid comprising the longest Open Reading Frame in SEQ ID NO: 284 under nitrogen deficiency-stress conditions are presented below. See previous Examples for details on the generations of the transgenic plants.

[0790] The results of the evaluation of transgenic rice plants in the T1 generation and expressing a nucleic acid encoding the PLPCase polypeptide of SEQ ID NO: 285 under stress conditions are presented below in Table D4. When grown under nitrogen deficiency-stress conditions, an increase of at least 5% was observed for root biomass (RootMax, which is the maximal rootmass measured during the life of the plant and RootThickMax, which is the maximal mass of thick roots measured during the life of the plant).

TABLE D4
Data summary for transgenic rice plants; for each parameter, the
overall percent increase is shown for the T1 generation, for each
parameter the p-value is <0.05.

| Parameter | Overall increase |
|---|---|
| RootMax | 10.4 |
| RootThickMax | 6.0 |

[0791] In addition, plants expressing the above PLPCase showed two lines which were clearly positive for greenness index; three lines were clearly positive for roothinmax, which is the maximal mass of thin roots measured during the life of the plant; and one line was clearly positive for number of filled seeds.

[0792] The evaluation of transgenic rice plants expressing a nucleic acid encoding the PLPCase polypeptide of SEQ ID NO: 287 under non-stress conditions are presented below in Table D5. When grown under non-stress conditions, an increase of at least 5% was observed for root biomass (Root/Shoot Index), and for seed yield (fill rate). In addition, two plant lines expressing the FeS nucleic acid of SEQ ID NO: 286 showed increased total root biomass (resp increase of 14% and 11%, p<0.1) and a third line showed increased amount of biomass of roots below a certain thickness threshold (RootThin, +7%, p<0.1).

TABLE D5
Data summary for transgenic rice plants; for each parameter, the overall
percent increase is shown, for each parameter the p-value is <0.05.

| Parameter | Overall increase |
|---|---|
| Root/Shoot Index | 11.9 |
| fillrate | 8.5 |

1. A method for enhancing yield-related traits in plants relative to control plants, comprising modulating expression in a plant of a nucleic acid encoding a DUF642 polypeptide, wherein said DUF642 polypeptide comprises an InterPro accession IPRO06946 DUF642 domain, preferably said DUF642 polypeptide comprises the signature sequence FSAARTCAQ (SEQ ID NO: 194).

2. The method according to claim 1, wherein said modulated expression is effected by introducing and expressing in a plant said nucleic acid encoding said DUF642 polypeptide.

3. The method according to claim 1, wherein said enhanced yield-related traits comprise increased yield relative to control plants, and preferably comprise increased biomass and/or increased seed yield relative to control plants.

4. The method according to claim 1, wherein said enhanced yield-related traits are obtained under non-stress conditions or under abiotic stress conditions.

5. The method according to claim 1, wherein said DUF642 polypeptide comprises one or more of the following motifs:
(i) Motif 1:
(SEQ ID NO: 181)
N[LAM][VL]KNG[DG]FEEGP[WYH][MI][FLI]P[NG][TS][STR]
[WL]GVL[LVI]P[PTS][NKM][LQDV][EDV][DE][ED][THY]S
[PS]L[PS][GP]W[IMT][IV],
(ii) Motif 2:
(SEQ ID NO: 182)
[VLA][EKAT][KPR]G[SAM][LRH]Y[SA][LIV][TI]F[SG]A
[AS]RTCAQ[DLAS]E[SVRL]L[NR][VI],
(iii) Motif 3:
(SEQ ID NO: 183)
D[PE][AT]CGP[LI][IL]D[AS][VIF]AI[KR]

6. The method according to claim 1, wherein said nucleic acid encoding a DUF642 is of plant origin, preferably from a monocotyledonous plant, further preferably from the family Poaceae, more preferably from the genus Oryza, most preferably from Oryza sativa.

7-8. (canceled)

9. The method according to claim 1, wherein said nucleic acid encodes the polypeptide represented by SEQ ID NO: 2 or SEQ ID NO: 4 or a nucleic acid encoding a polypeptide having at least 90% sequence identity to SEQ ID NO: 2 and/or SEQ ID NO: 4.

10. (canceled)

11. A plant, plant part thereof, including seeds, or plant cell, obtainable by a method according to claim 1, wherein said plant, plant part or plant cell comprises a recombinant nucleic acid encoding a DUF642 polypeptide as defined in claim 1.

12. A construct comprising:
(i) nucleic acid encoding a DUF642 as defined in claim 1;
(ii) one or more control sequences capable of driving expression of the nucleic acid sequence of (i); and optionally
(iii) a transcription termination sequence.

13. (canceled)

14. Use of a construct according to claim 12 in a method for making plants having enhanced yield-related traits, preferably increased yield relative to control plants, and more preferably increased seed yield and/or increased biomass relative to control plants.

15. A plant, plant part or plant cell transformed with a construct according to claim.

16. A method for the production of a transgenic plant having enhanced yield-related traits relative to control plants, preferably increased yield relative to control plants, and more preferably increased seed yield and/or increased biomass relative to control plants, comprising:
(i) introducing and expressing in a plant cell or plant a nucleic acid encoding a DUF642 polypeptide as defined in claim 1; and
(ii) cultivating said plant cell or plant under conditions promoting plant growth and development.

17. A transgenic plant having enhanced yield-related traits relative to control plants, preferably increased yield relative to control plants, and more preferably increased seed yield and/or increased biomass, resulting from modulated expression of a nucleic acid encoding a DUF642 polypeptide as defined in claim 1 or a transgenic plant cell derived from said transgenic plant.

18. A transgenic plant according to claim 11, or a transgenic plant cell derived therefrom, wherein said plant is a crop plant, such as beet, sugarbeet or alfalfa; or a monocotyledonous plant such as sugarcane; or a cereal, such as rice, maize, wheat, barley, millet, rye, triticale, sorghum, emmer, spelt, einkorn, teff, milo or oats.

19. Harvestable parts of a plant according to claim 18, wherein said harvestable parts are preferably shoot biomass and/or seeds.

20. Products derived from a plant according to claim 18 and/or from harvestable parts of said plant.

21-22. (canceled)

23. A method for the production of a product comprising the steps of growing the plants according to claim 11 and producing said product from or by
a. the plants according to claim 11; or
b. parts, including seeds, of these plants.

24. (canceled)

25. Construct according to claim 12 comprised in a plant cell.

26. Recombinant chromosomal DNA comprising the construct according to claim 12.

27-47. (canceled)

48. Isolated nucleic acid molecule selected from:
(i) a nucleic acid represented by SEQ ID NO: 199;
(ii) the complement of a nucleic acid represented by SEQ ID NO: 199;
(iii) a nucleic acid encoding epimerase-related like polypeptide having in increasing order of preference at least 50%, 51%, 52%, 53%, 54%, 55%, 56%, 57%, 58%, 59%, 60%, 61%, 62%, 63%, 64%, 65%, 66%, 67%, 68%, 69%, 70%, 71%, 72%, 73%, 74%, 75%, 76%, 77%, 78%, 79%, 80%, 81%, 82%, 83%, 84%, 85%, 86%, 87%, 88%, 89%, 90%, 91%, 92%, 93%, 94%, 95%, 96%, 97%, 98%, or 99% sequence identity to the amino acid sequence represented by SEQ ID NO: 200, and additionally or alternatively comprising one or more motifs having in increasing order of preference at least 50%, 55%, 60%, 65%, 70%, 75%, 80%, 85%, 90%, 95%, 96%, 97%, 98%, 99% or more sequence identity to any one or more of the motifs 7 to 13, and further preferably conferring enhanced yield-related traits relative to control plants.
(iv) a nucleic acid molecule which hybridizes with a nucleic acid molecule of (i) to
(iii) under high stringency hybridization conditions and preferably confers enhanced yield-related traits relative to control plants.

49. Isolated polypeptide selected from:
(i) an amino acid sequence represented by SEQ ID NO: 200;
(ii) an amino acid sequence having, in increasing order of preference, at least 50%, 51%, 52%, 53%, 54%, 55%, 56%, 57%, 58%, 59%, 60%, 61%, 62%, 63%, 64%, 65%, 66%, 67%, 68%, 69%, 70%, 71%, 72%, 73%, 74%, 75%, 76%, 77%, 78%, 79%, 80%, 81%, 82%, 83%, 84%, 85%, 86%, 87%, 88%, 89%, 90%, 91%, 92%, 93%, 94%, 95%, 96%, 97%, 98%, or 99% sequence identity to the amino acid sequence represented by SEQ ID NO: 200, and additionally or alternatively comprising one or more motifs having in increasing order of preference at least 50%, 55%, 60%, 65%, 70%, 75%, 80%, 85%, 90%, 95%, 96%, 97%, 98%, 99% or more sequence identity to any one or more of the motifs 7 to 13, and further preferably conferring enhanced yield-related traits relative to control plants;
(iii) derivatives of any of the amino acid sequences given in (i) or (ii) above.

50-78. (canceled)

The application's sequence listing, which the Patent Office published only in electronic form, follows.

SEQUENCE LISTING (374 sequences)

SEQ ID NO: 1 - DNA, 1140 bp, Oryza sativa
atgagaagaaaaacagagatgattcagactaccccctgcgtcgcgctgctcttgctcgtcggcgttgcttttgctgctcgatcggcgtcggctatcaccgatggcctgctgccgaatggcaacttcgaggaggcgccggacgagtcgcagatgaacggcacgagggtgacgggtcgctacgcgatacctcagtgggagatctccgggttcgtggagtacatcgggtcgggccagaagcagggagacatgctcctgccggtgccggagggcgcgtacgccgtgcggctgggcaacgaggcctccatccagcagcggcttaccctgacgcggggaatgcactactccatcatattcagcgcggcgcgcacctgcgcccagtccgagctcctcaacatcacgatcacccccgagtccggcgagatccccatccagacggtgtacaccagcagcggctgggactcctactcctgggccttcaaggccaagcacagcgtcgtgttgttcatcgtccacaaccccggtgtctctgatgacgaagcttgcggccccctcatcgactcgttcgccattaagaccctgaaccctcctcaaagaacgaaaggtaacatgctgaagaatgggggcttcgaggagggcccgtacatcttccccaacacgtcctggggcgtgcttgtgccgcccatggacgaggacgactactcgccgctgtccccgtggacgatcctgtcgaccaccaagtccgtcaagtacatcgacgcggcgcactacgctgtgccgggcggcgcccgcgcggttgagctggtgtccggcatggagacggcgatgctgcaggaggtgagcaccgtgcccgggcggtcgtacaggctggagttctccgtcggggacgccggcgacgggtgctccgggtccctgaccgtgcaggcgtacgcgtcgcgcgggagcgtgaaggtgacgtaccagtcgcagggcacgggcggctacaagcgcgggctgctcgagttcacggccacggagaagcggacgcgggtagtgttcgtcagcatggcctacaccacgaagtccgacggcacgctgtgtggtcccgtcatcgacgacgcgtcgctcgtcagtgtccacagccaccgccggttccttctgtaa

SEQ ID NO: 2 - protein, 379 aa, Oryza sativa
MRRKTEMIQTTPCVALLLLVGVAFAARSASAITDGLLPNGNFEEAPDESQMNGTRVTGRYAIPQWEISGFVEYIGSGQKQGDMLLPVPEGAYAVRLGNEASIQQRLTLTRGMHYSIIFSAARTCAQSELLNITITPESGEIPIQTVYTSSGWDSYSWAFKAKHSVVLFIVHNPGVSDDEACGPLIDSFAIKTLNPPQRTKGNMLKNGGFEEGPYIFPNTSWGVLVPPMDEDDYSPLSPWTILSTTKSVKYIDAAHYAVPGGARAVELVSGMETAMLQEVSTVPGRSYRLEFSVGDAGDGCSGSLTVQAYASRGSVKVTYQSQGTGGYKRGLLEFTATEKRTRVVFVSMAYTTKSDGTLCGPVIDDASLVSVHSHRRFLL

SEQ ID NO: 3 - DNA, 909 bp, Oryza sativa
atggtgctggtggtccccgaggggagccacgcggtgcggctcgggaacgaggcgtcgatccggcagcggctcgccggcgcggcgcgcggcgcgcggtacgcgctcacgttcagcgcggcgcggacgtgcgcgcaggcggagcggctgaacgtgtcggcgtcggggcagtgggcggtgctccccatgcagaccatgtacagcagcaacggctgggactcgtacgcctgggcctgggatgccgccgccgacgcgttcgacgtcgtcatccacaaccccggcgtcaccgaggaccccgcctgcggccccctcatcgactccgtcgccatccgcaccctcaaccctcctcgccgcaccaacaagaacctggtgaagaacggggacttcgaggagggcccgtacatcatcccggggactaggtggggggtgctgatcccgtccatggtggtggacgagcactcgccgctgccggggtggatggtggagtcgctcaaggcggtgaagtacatcgacagcgaccacttcgcggtgccgcgcgggcggcgcgctgtcgagctgctggcggggcgggagagcgcgatcgcgcaggtgatccgcaccgtccccgggaggcagtacgcgctgtcgttcaccgtcggcgacgccagcaacggctgcgaggggtcgctggtggtggaggcgtacgccgggagggagtccaccagggtggcgcacgagtcggctggccgcggcggcgccgccaagcgcgccgtgctgccgttccgcgccgccgcggcgcgcacccgcgtcgtgttcttcagctcgttctacagcaccaggagcgacgacatgagctcgctctgcgggccggtgatcgacgacgtcgccgtcgtcagcgtgcgcgcgcggcggccggcggcgaagcgcggctag

SEQ ID NO: 4 - protein, 302 aa, Oryza sativa
MVLVVPEGSHAVRLGNEASIRQRLAGAARGARYALTFSAARTCAQAERLNVSASGQWAVLPMQTMYSSNGWDSYAWAWDAAADAFDVVIHNPGVTEDPACGPLIDSVAIRTLNPPRRTNKNLVKNGDFEEGPYIIPGTRWGVLIPSMVVDEHSPLPGWMVESLKAVKYIDSDHFAVPRGRRAVELLAGRESAIAQVIRTVPGRQYALSFTVGDASNGCEGSLVVEAYAGRESTRVAHESAGRGGAAKRAVLPFRAAAARTRVVFFSSFYSTRSDDMSSLCGPVIDDVAVVSVRARRPAAKRG

SEQ ID NO: 5 - DNA, 1122 bp, Oryza sativa
atgcgtcgcgtcacggtgctcgttctgctcctcgcctgcgcggcggcgcgcgccgccgccgccgtcgtcaccgacgggctgttgccgaacggcaacttcgaggagggcccacccaagtcggacctggtgaacggcacggtggtgcgcggcgcgaacgccatcccgcggtgggagacgtccgggttcgtggagtacatcgagtccgggcacaagcagggggacatgctgctggtggtgccgcagggcgcgcacgccgtgcgcctcggcaacgaggcgtccatccggcagcggctcgccgtgaccaggggcgcctactacgccgtcacgtttagcgcggcgcgcacctgcgcccaggcggagcagctcaacgtgtcggtgagccccgagtggggggtgctccccatgcagaccatctacggcagcaacgggtgggactcgtacgcgtgggcgttcaaggcgaagatggacgaggtggcgctcgtcatccacaacccgggcgtggaggaggacccggcgtgcggcccgctcatcgacggcgtcgccatcagggcgctgtacccgccgacgctggccaaggggaacatgctcaagaacggcgggttcgaggagggcccctacttcctccccaacgcgtcgtggggggtgctcgtcccgcccaacatcgaggacgaccactcgccgctcccggcgtggatgatcatgtcgtccaaggccgtcaagtacgtcgacgccgcgcacttcgccgtgccgcagggcgcccgcgccgtggagctggtggggggcaaggagtcggcgctggtgcaggaggtgcgcaccgtgcccgggtggacgtaccgcctgtcgttcgccgtgggcgacgcgcgcgacgggtgcgcgggctccatggtcgccgaggcgtacgcggcgagggcctccatcaaggtgccgtacgagtccaagggcaccggcgggtacaagcgcgccgtcctcgagttcgccgccatcgccaaccgcacccgcgtcgtgttccagagcacgttctaccacaccatgaccgacggctcgctctgcgggccggtcatcgacgacgcctccctcgtcggcctccgcaagaagacggccggccggcggctgctcctgtaa

SEQ ID NO: 6 - protein, 373 aa, Oryza sativa
MRRVTVLVLLLACAAARAAAAVVTDGLLPNGNFEEGPPKSDLVNGTVVRGANAIPRWETSGFVEYIESGHKQGDMLLVVPQGAHAVRLGNEASIRQRLAVTRGAYYAVTFSAARTCAQAEQLNVSVSPEWGVLPMQTIYGSNGWDSYAWAFKAKMDEVALVIHNPGVEEDPACGPLIDGVAIRALYPPTLAKGNMLKNGGFEEGPYFLPNASWGVLVPPNIEDDHSPLPAWMIMSSKAVKYVDAAHFAVPQGARAVELVGGKESALVQEVRTVPGWTYRLSFAVGDARDGCAGSMVAEAYAARASIKVPYESKGTGGYKRAVLEFAAIANRTRVVFQSTFYHTMTDGSLCGPVIDDASLVGLRKKTAGRRLLL

SEQ ID NO: 7 - DNA, 1134 bp, Oryza sativa
atggcgttctataatggcgcgagtgttgtcgcgctgctgttgctggtctccacggctgctcgagctgccggcgatggcctgctgctcaacggcaacttcgagtaccagccgagcaagtcacagatgaacggcacaagggtgatggcggagtacgcgatcccgtactggaagatcaccgggttcgtggagtacatctcgtccgggcagaagcagggcgacatgctgctgacggtgccagagggcgcgcacgccgtgcggctgggcaacgaggcctccatcgagcagcagatcagcgtgacccggggcatgtactactccatcacattcagcgccgcgcgcacctgcgcccagtccgagaagctgaacgtgtcagtggctcccggcccggagtccggcgagctccccatccagaccgtgtacaccagcagcggctgggactcgtacgcctgggcgttcaaggccaagcgcggcctcgtgtcgctcatcatccacaaccacggcgaggacgacgaccccgcgtgcggcccgctcatcgactccgtcgccatcaagaccctgtaccctcctcaggccacccagaacaacatgctgagaaacggggacttcgaggaggggccgtacatgttcccgaacgcggcgtggggagtgatggtgccgccgatctcagaggacgaccactcgccgctgccggggtggatggtgatgtcggacacgaaggccgtcaagtgcgtcgactccgcgcacttcaccgtgccgcacggcgcgcgcgccgtggagctggtgtccgggctcgagacggcgctgatgcaggaggtgcgcaccgtgccggggaggtcgtacaggctggagttctcggtcggggacgccagcgacggttgcgtgggttccatgcaggtgaaagggtacgcgggtcaggggtgcacgaccgtgacgtacagctcccagggcacgggcgggcacacccgcgcgtcgctggagttcgccgccgtcgcgaacaccacgcgggtggtgttcgtcagctcgacgtacatcaccaagtgggacgggacgctgtgcgggcccgtcgtcgacgacgcctcgctcgtgtgcgtgtcccagcagcagccgcccgctcgccgcctgcttcgtctctga

SEQ ID NO: 8 - protein, 377 aa, Oryza sativa
MAFYNGASVVALLLLVSTAARAAGDGLLLNGNFEYQPSKSQMNGTRVMAEYAIPYWKITGFVEYISSGQKQGDMLLTVPEGAHAVRLGNEASIEQQISVTRGMYYSITFSAARTCAQSEKLNVSVAPGPESGELPIQTVYTSSGWDSYAWAFKAKRGLVSLIIHNHGEDDDPACGPLIDSVAIKTLYPPQATQNNMLRNGDFEEGPYMFPNAAWGVMVPPISEDDHSPLPGWMVMSDTKAVKCVDSAHFTVPHGARAVELVSGLETALMQEVRTVPGRSYRLEFSVGDASDGCVGSMQVKGYAGQGCTTVTYSSQGTGGHTRASLEFAAVANTTRVVFVSSTYITKWDGTLCGPVVDDASLVCVSQQQPPARRLLRL

SEQ ID NO: 9 - DNA, 1140 bp, Oryza sativa
atgagaagaaaaacagagatgattcagactaccccctgcgtcgcgctgctcttgctcgtcggcgttgcttttgctgctcgatcggcgtcggctatcaccgatggcctgctgccgaatggcaacttcgaggaggcgccggacaagtcgcagatgaacggcacgagggtgacgggtcgctacgcgatacctcagtgggagatctccgggttcgtggagtacatcgggtcgggccagaagcagggagacatgctcctgccggtgccggagggcgcgtacgccgtgcggctgggcaacgaggcctccatccagcagcggcttaccctgacgcggggaatgcactactccatcacattcagcgcggcgcgcacctgcgcccagtccgagctcctcaacatcacgatcacccccgagtccggcgagatccccatccagacggtgtacaccagcagcggctgggactcctactcctgggccttcaaggccaagcacagcgtcgtgttgttcatcgtccacaaccccggtgtctctgatgacgaagcttgcggccccctcatcgactcgttcgccattaagaccctgaaccctcctcaaagaacgaaaggtaacatgctgaagaatgggggcttcgaggagggcccgtacatcttccccaacacgtcctggggcgtgcttgtgccgcccatggacgaggacgactactcgccgctgtccccgtggacgatcctgtcgaccaccaagtccgtcaagtacatcgacgcggcgcactacgctgtgccgggcggcgcccgcgcggttgagctggtgtccggcatggagacggcgatgctgcaggaggtgagcaccgtgcccgggcggtcgtacaggctggagttctccgtcggggacgccggcgacgggtgctccgggtccctgaccgtgcaggcgtacgcgtcgcgcgggagcgtgaaggtgacgtaccagtcgcagggcacgggcggctacaagcgcgggctgctcgagttcacggccacggagaaacggacgcgggtagtgttcgtcagcatggcctacaccacgaagtccgacggcacgctgtgtggtcccgtcatcgacgacgcgtcgctcgtcagtgtccacagccaccgccggttccttctgtaa

SEQ ID NO: 10 - protein, 379 aa, Oryza sativa
MRRKTEMIQTTPCVALLLLVGVAFAARSASAITDGLLPNGNFEEAPDKSQMNGTRVTGRYAIPQWEISGFVEYIGSGQKQGDMLLPVPEGAYAVRLGNEASIQQRLTLTRGMHYSITFSAARTCAQSELLNITITPESGEIPIQTVYTSSGWDSYSWAFKAKHSVVLFIVHNPGVSDDEACGPLIDSFAIKTLNPPQRTKGNMLKNGGFEEGPYIFPNTSWGVLVPPMDEDDYSPLSPWTILSTTKSVKYIDAAHYAVPGGARAVELVSGMETAMLQEVSTVPGRSYRLEFSVGDAGDGCSGSLTVQAYASRGSVKVTYQSQGTGGYKRGLLEFTATEKRTRVVFVSMAYTTKSDGTLCGPVIDDASLVSVHSHRRFLL

SEQ ID NO: 11 - DNA, 1134 bp, Oryza sativa
atgagaaggaaaacagagatggtgcggagcacctgctgcgtggtgctgctcttgctcctcagcgttgctgctcgatcggcttcggccatcatggacggcctgctgccgaatggcaatttcgaggaggcgccggacaagtcgcagctgaacggcacgagggtgatcgggcgctacgcgataccgcagtgggagatctccgggttcgtggagtacatcgggtcgggccagatgcagggtgacatgctcctgccggtgccggagggcgcgtacgccgtgcggctgggcaacgaggcctccatccagcagcggctcaccctgacgcggggaatgcactactccgtcaccttcagcgcggcgcgcacctgcgcccagtccgagctcctcaacatcacggtcaccccggagatcggcgaggtccccatccagaccgtgtacaccagcagcggctgggactcctactcctgggcgttcaaggcgagacgcagcgacgtgtcgctcatcgttcacaaccctggcgtcaccgatgacgcggcctgcggccccctcatcgactcgttcgccatcaagactctgcaatctcctccaagcaccaaagataacttgctgaagaatgggggcttcgaggaaggcccgtacatcttccccaacacgtcgtggggcgtgcttgtgccgccgatggacgaggacgactactcgccactgtcgccatggacgatcatgggatacaccaagtccgtcaagtacgtggacgcggcgcactacgccgttccaggcggcgcacgcgcggtggagctggtggccggcatggaggcggcgctggtgcaggaggtgtgcaccgtgcccgggcggtcgtaccggctggagttctccgtcggggacgccggcgacgggtgcgtggggtccatgtccgtgcaggcgtacgtgtcgcacggcagcgtgaaggtgccgtacgagtcgcagggcaggggtgggtacaagcgcggggtgctcgagttcacggcgacggacaagcggacgcgggtggtgttcgtcagcatggcctacaccatgaagcccgacggcacgctctgtgggcccgtcgtcgacgacgcgtcggtcgtcggcgtccacagccatcgccggcttcttctgtaa

SEQ ID NO: 12 - protein, 377 aa, Oryza sativa
MRRKTEMVRSTCCVVLLLLLSVAARSASAIMDGLLPNGNFEEAPDKSQLNGTRVIGRYAIPQWEISGFVEYIGSGQMQGDMLLPVPEGAYAVRLGNEASIQQRLTLTRGMHYSVTFSAARTCAQSELLNITVTPEIGEVPIQTVYTSSGWDSYSWAFKARRSDVSLIVHNPGVTDDAACGPLIDSFAIKTLQSPPSTKDNLLKNGGFEEGPYIFPNTSWGVLVPPMDEDDYSPLSPWTIMGYTKSVKYVDAAHYAVPGGARAVELVAGMEAALVQEVCTVPGRSYRLEFSVGDAGDGCVGSMSVQAYVSHGSVKVPYESQGRGGYKRGVLEFTATDKRTRVVFVSMAYTMKPDGTLCGPVVDDASVVGVHSHRRLLL

SEQ ID NO: 13 - DNA, 1119 bp, Oryza sativa
atgactgggagcgcgcgtagcgtcgtggcgctgctcttcttgctcgtcggctcggctgctcgggccgattcagccgtcaccgatggcctgttgccaaatggcaacttcgaggacgggccggacaagtcccagctgaacggcacggtggtgacgggtcgatacgccatactgaactgggagatctcggggttcgtggagtacatcgagtccgggcacagggagcaggacatgatcctggcggtgccggagggcgcgcgcgccgtgcgattgggcaacgacgccaccatccggcagaggcttagcgtgacgcggcgcgcttactactccatcactttcagcgcggcgcgcacctgcgcccagaaggagaagctgaacatgtccgtcacaccggagttcggcgtgctcccgatccagacggtttacaccagcagcggctgggactcctactcctgggccttcagggccaaacacagcgtcgtgtggctctccatccacaaccccggcgaggaggaggacccggcgtgcggcccgctcattgactccattgccatcaagaacctctaccctcctccccgcaccaaaggaaacatgttgagaaacggagacctggaggaggggccgtacatcttcccggacgcgacgtggggcgtgctggtgccaccgatcttcgaggacgagcactcgccgctgccggggtggatgatcatgtcggacacgaaggtcatcaagtacgtggactcgccgcaccacagggtgccgcagggcgcgcgcgccgtggagcttgtggccggcagggagaccgcgctggtgcaggaggtggcgaccgtgcccgggcggtcgtacaggctgtcgttctccgtcggggacgcgggcaacgggtgcaaggattcgctggccgtggaggcgtacgcggcgcgggccacggccaaggtgccgtacgagtcgcagggcacgggcgggcacaagcgcgcccagctcgagttcgcggcggtcgcgaacctgacgcgcgtggtgttccagagcttcaactaccacacgaagccggacgggacgctgtgcgggcctctcgtcgatgacatctccctcgtcagcgtacgcaagcgcgctgctcgcctgtaa

SEQ ID NO: 14 - protein, 372 aa, Oryza sativa
MTGSARSVVALLFLLVGSAARADSAVTDGLLPNGNFEDGPDKSQLNGTVVTGRYAILNWEISGFVEYIESGHREQDMILAVPEGARAVRLGNDATIRQRLSVTRRAYYSITFSAARTCAQKEKLNMSVTPEFGVLPIQTVYTSSGWDSYSWAFRAKHSVVWLSIHNPGEEEDPACGPLIDSIAIKNLYPPPRTKGNMLRNGDLEEGPYIFPDATWGVLVPPIFEDEHSPLPGWMIMSDTKVIKYVDSPHHRVPQGARAVELVAGRETALVQEVATVPGRSYRLSFSVGDAGNGCKDSLAVEAYAARATAKVPYESQGTGGHKRAQLEFAAVANLTRVVFQSFNYHTKPDGTLCGPLVDDISLVSVRKRAARL

SEQ ID NO: 15 - DNA, 1389 bp, Oryza sativa
atggcacagccccagtgccccaggccccaagctcgaacccccaacccgctgtgcgcggcgacgccgtggccccgagctgggcggcgtgcaaactggagaggaatcttctgtagcagatggtccccaagttgccgtgatgccttccgtacgatccagccggcgcgtctcgcggcgtcccggactcatcctccctgcacagatcacacaagttgtaataagcaacagctcttatatatctccagcgaagttcgagtgctggaccgtgtgacgagagctcatgatcatggtcttggcgaagtgcacgcgctgcctggctcttgtggtggtggtgctcgttggcgtggctgcaccggtggtcttctctgtcaccgatggccttctaccaaacggcaacttcgagcacgggccggacaagtcccagctgaaccgaactgggagatctctgggttcgtggagtacatcgggtccgggcacaaggagcaggacatgatcctggcggtgccggagggcgcgtacgccgtgcgcctgggcaacgacgcaaccatccggcagcggatcagcgtcacccgtcacatgtactactctgtcacattcagcgccgcgcgcacctgcgcccaggccgagaagctgaacgtgtccgtcacgcttgagttcggcgtgctcccgatccagaccgtgtacaccagcaccggctgggactcctactcctgggccttcaaggccgaacacagcgccgtgtggctctccatccacaaccccggcgtcgaggaggacccggcctgcggcccactcatcgacctcgtcgccatcaagactcttcctcctccccatcacaccaggggtggtacaatgctgaggaacggggacttcgaggagggcccgtacatcttcgccgacacgccgtggggtgtcctggtgccgccgatggacgaggacgtgcactcgccgctgcccgggtggatggtcatgtcgaccacgaaggtcgtcaagtacgtggactcggcgcgccacgcggtgccgagcggcgcgcacgccgtggagatggtggccgggagggagtgcgcgctggtgcaggaggtggcgaccgtgcccgggcggcggtacacgctgtcgttctccgtcggggacgccggcaacgggtgcatcgggtcccttgccgtggacgcgtacgcggcgcgggcgacgctgaaggtgtcgtacgagtcgcggggcactggcgggcacgagcgcgccgagctcgtgttcgcggcggtcgccaaccggacgcgcgtggtgttccacagctccaaccaccatatgaagtcggacggcacgctgtgcggtcctgtggtcgatgacgtctccctcgtcagtgtggacaagcacacggttcgccggttgttgatgtag

SEQ ID NO: 16 - protein, 462 aa, Oryza sativa
MAQPQCPRPQARTPNPLCAATPWPRAGRRANWRGIFCSRWSPSCRDAFRTIQPARLAASRTHPPCTDHTSCNKQQLLYISSEVRVLDRVTRAHDHGLGEVHALPGSCGGGARWRGCTGGLLCHRWPSTKRQLRARAGQVPAEPNWEISGFVEYIGSGHKEQDMILAVPEGAYAVRLGNDATIRQRISVTRHMYYSVTFSAARTCAQAEKLNVSVTLEFGVLPIQTVYTSTGWDSYSWAFKAEHSAVWLSIHNPGVEEDPACGPLIDLVAIKTLPPPHHTRGGTMLRNGDFEEGPYIFADTPWGVLVPPMDEDVHSPLPGWMVMSTTKVVKYVDSARHAVPSGAHAVEMVAGRECALVQEVATVPGRRYTLSFSVGDAGNGCIGSLAVDAYAARATLKVSYESRGTGGHERAELVFAAVANRTRVVFHSSNHHMKSDGTLCGPVVDDVSLVSVDKHTVRRLLM

SEQ ID NO: 17 - DNA, 1119 bp, Panicum virgatum
atgcgccgcgtcgcgctgttgctgctcgtctgcgcggcggcgcgcgccgccgcggtcgtcaccgacgggctgctcccgaacggcaacttcgaggagggcccgcccaagtcggcgctggtgaacggcacggtggtgaagggcgccaacgcgatcccgcgctgggagacgtcgggcttcgtggagtacatcgagtccgggcacaagcagggcgacatgctcctggtggtcccgcagggcgcccacgccgtgcgcctgggcaacgaggcctccatccgccagcgcctcgccgtcacccgcggcgcctactacgccatcaccttcagcgcggcgcgcacctgcgcgcaggccgagcgcctcaacatctcggtgagccccgagtggggcgtgctcccgatgcagaccatctacggcagcaacggctgggactcgtacgcctgggccttcaaggccaagctcgacgccgtcacgctcgtcatccacaaccccggcgtcgaggaggaccccgcctgcggcccgctcatcgacggcgtcgccatccgcgcgctctacccgcccaggctcgcccgcggcaacatgctcaagaacggcggcttcgaggagggcccctacttcctgcccggcgcgtcctggggcgtgctcgtgccgcccaacatcgaggacgaccactcgccgctccccgcctggatgatcgcctcctccaaggccgtcaagtacgtggacgccgcgcacttcagggtgccccagggcgcgcgcgccgtcgagctggtgggcggccgggagagcgcgctcgtgcaggaggtgcgcaccgtgcccgggtggagctaccgcctcgccttcgccgtgggcgacgccggcgacggctgcgcggggcccatggtcgccgaggccttcgcggcgcgcgccaccgtcaaggtgccctacgagtccaagggcaccggcgggtacaagcgcgccgtgctggacttcacggccatcgccaaccgcacccgcgtcgtgttccagagcaccttctaccacatgaaggccgacggcacgctctgcgggcccctcgtcgacgacgcctcgctcgtcgggctgcgcaagaagcccgccgccggcagccgccgcctgctgctgtga

SEQ ID NO: 18 - protein, 372 aa, Panicum virgatum
MRRVALLLLVCAAARAAAVVTDGLLPNGNFEEGPPKSALVNGTVVKGANAIPRWETSGFVEYIESGHKQGDMLLVVPQGAHAVRLGNEASIRQRLAVTRGAYYAITFSAARTCAQAERLNISVSPEWGVLPMQTIYGSNGWDSYAWAFKAKLDAVTLVIHNPGVEEDPACGPLIDGVAIRALYPPRLARGNMLKNGGFEEGPYFLPGASWGVLVPPNIEDDHSPLPAWMIASSKAVKYVDAAHFRVPQGARAVELVGGRESALVQEVRTVPGWSYRLAFAVGDAGDGCAGPMVAEAFAARATVKVPYESKGTGGYKRAVLDFTAIANRTRVVFQSTFYHMKADGTLCGPLVDDASLVGLRKKPAAGSRRLLL

SEQ ID NO: 19 - DNA, 1128 bp, Sorghum bicolor
atgcggcgcgtcgcgctgttgctgctcctcgtatgcgcgctggcgcgggctgccgcggtcgtcaccgacggtcttctcccgaacggcaacttcgaggatggcccgcccaagtcggcgctggtgaacggcacggtggtgtcgggcgccaacgccatcccgcgctgggagacctccggcttcgtggagtacatcgagtcgggccacaagcagggcgacatgctgctggtggtgccgcagggcgcccacgccgtgcgcctgggcaacgaggcctccatccggcagcgcctcgccgtggcgcgcggcgcctactacgccatcaccttcagcgcggcgcggacgtgcgcgcaggcggaggcgctcaacgtgtcggtgagccccgagtggggtgtgctcccgatgcagaccatctacggcagcaacggctgggactcgtacgcctgggccttcaaggcgaagctgagcaccgtgacgctcgtcatccacaaccccggcgtggaggaggaccccgcctgcggcccgctcatcgacggcgtcgccatccgggcgctgtacccgccgacgctcgccagggggaacatgctcaagaacggcgggttcgaggagggcccctacttcctgcccaacgcgtcgtggggcgtgctggtgccgccaaacatcgaggacgaccactcgccgctccccggctggatgatcgcctcctccaaggccgtcaagtacgtggacgccgcgcacttcgccgtgccccagggcgcgcgcgccgtcgagctggtgggcgggcgggagagcgcgctggtccaggaggtgcgcaccgtgcccgggtggagctaccgcctcgccttcgccgtgggggactccggcgacggctgcacggggtccatggtcgccgaggcctacgcggcgcgcgccaccgtcaaggtgccgtacgagtccaagggcaccggagggtacaagcgcgccgtgctcgacttcacggccgtcgccaaccgcacacgcgtcgtgttccagagcaccttctaccacatgaaggccgacggcacgctctgcggcccgctcgtcgacgacgcctccgtcgtcggcctgcgcaagaagcctgccgccgccggccgccgcctcctgcagttcctgtaa

SEQ ID NO: 20 - protein, 375 aa, Sorghum bicolor
MRRVALLLLLVCALARAAAVVTDGLLPNGNFEDGPPKSALVNGTVVSGANAIPRWETSGFVEYIESGHKQGDMLLVVPQGAHAVRLGNEASIRQRLAVARGAYYAITFSAARTCAQAEALNVSVSPEWGVLPMQTIYGSNGWDSYAWAFKAKLSTVTLVIHNPGVEEDPACGPLIDGVAIRALYPPTLARGNMLKNGGFEEGPYFLPNASWGVLVPPNIEDDHSPLPGWMIASSKAVKYVDAAHFAVPQGARAVELVGGRESALVQEVRTVPGWSYRLAFAVGDSGDGCTGSMVAEAYAARATVKVPYESKGTGGYKRAVLDFTAVANRTRVVFQSTFYHMKADGTLCGPLVDDASVVGLRKKPAAAGRRLLQFL

SEQ ID NO: 21 - DNA, 1203 bp, Sorghum bicolor
atggcgatcggtaagcggagcgtgcacggcgccgcgctggtcctgctgctggtggtctgcgtcgcggcgcgggctgtctcggccgtcggcgatggtcctctactgaacggcaacttcgaggactcgccgaacccctcccagatgagcggctcggtggtgacaggggagcacgcgatctcctactggaggacgtccggccacatcgagttcatctgctccggccagacgcagggggacatggtcttgacggtgccggacggcgcgcacgccctgcggttgggcaacggcgcctccatcgagcagcggatcagcctcacgccgggctcgtactactccctcacgttcagcgcgtcgcgcacctgcgcccaggacgaggtgctcaacgtgacggccgcccccgtgtccggctccggcgccgcggcccagaccggcgagctccccatccagacggtgtacaccagcagcggctgggactcctactcctgggccttcaaggcggaggccggcctcgtgtccatcatcatcacccacatctgcggcgaacaggaagaccccgcgtgcggccccgtcgtcgacgccttcgccatcaagacgctcagccagcctgaggccacgggagataacctgctgaggaacggggacttcgaggagggcccgtacatcccgccggagtcgccgtgtggagtgatgctgccgccgatggaccaggactgcgtctccccgctgcccgggtggaagatcatgtcgtacaagaagtcggtcaagtacgtggactcggcgcacttcgcggtgccgcgcggcgcgcgcgccgtggagctggtgtccggcgtggagaccgcgctgatgcaggaggtgtacaccaccgtggaagggagctggtacaggctcgagttctcggtcggggacgccgccaacggctgcgcgtcgccgtcgtatgacgatggttcctcgtccggcgggatgaaggtgaaggcatacgcggggtcgagcgaaaccaccgtggacatcgatttccacggcgccggcggttccaaacgcgggaagatcgagttcagggccaccgcgaaccccaccagggtggtgttcgtcagcttgggctaccacaccaagtgcgacaacagcggcacgctctgcgggcccgtcgtagacgacgtctcgctcgtccccataccgcagccgtatgctcgccggctacttctctag

SEQ ID NO: 22 - protein, 400 aa, Sorghum bicolor
MAIGKRSVHGAALVLLLVVCVAARAVSAVGDGPLLNGNFEDSPNPSQMSGSVVTGEHAISYWRTSGHIEFICSGQTQGDMVLTVPDGAHALRLGNGASIEQRISLTPGSYYSLTFSASRTCAQDEVLNVTAAPVSGSGAAAQTGELPIQTVYTSSGWDSYSWAFKAEAGLVSIIITHICGEQEDPACGPVVDAFAIKTLSQPEATGDNLLRNGDFEEGPYIPPESPCGVMLPPMDQDCVSPLPGWKIMSYKKSVKYVDSAHFAVPRGARAVELVSGVETALMQEVYTTVEGSWYRLEFSVGDAANGCASPSYDDGSSSGGMKVKAYAGSSETTVDIDFHGAGGSKRGKIEFRATANPTRVVFVSLGYHTKCDNSGTLCGPVVDDVSLVPIPQPYARRLLL

SEQ ID NO: 23 - DNA, 1140 bp, Sorghum bicolor
atgggaaggggaagcgagacagtgccgaacgcccgtcgagctgcgctgttcttgatcgtctgcttggcggctcgagcggcttcggcaatccaggatggcctgctgccgaacggcaacttcgaggaggcgccacccaagtcgcagctcaaaggctcgagggtgatggggcgcaacgcgataccgcactgggagatctcggggttcgtggagtacatcggatccgggcagaagcagggtgacatgctcctgccggtgccggagggcgcctacgccgtgcggctcgggaacgaggcctccatccagcagcgtctcgccctgacgcagggcgcgcactactccatcaccttcagcgcggcgcgcacctgcgcccaggccgagcagctcaacgtcacggtcgcccccgagtcggacattctccctatccagacggtgtacaccagcagcggctgggactcctactcctgggccttcaaggccacgagcagcgtcgtctcgctgatcatccacaaccccggtgtcgccgaggacgcagcctgcggccccctcatcgacttgttcgccattaagaccctgccgacgcctcagagcagcaagaataatctgctgaagaatggggacttcgaggagggcccgtacatcttccccaacacgcggtggggggtgctggtgccgcccatggacgaggacgactactcgccgctgtcgccgtggatgatcctgtcgtccaccaagtcggtgaagtacgtggacgcgccgcaccacgtcgtgccgcacggtgcccgcgccgtggagctggtgtccggcatggagacagcgctggtgcagaacgcgaccaccgttcccggactgccctacaggcttcagttctcggccggggacgccggcaacggctgcgtgggctccatggctgtccaggcgtacgccgggggcaagagcgtgaaggcgcagttccagtcccagggcaaaggcggccacaagcgcggcgtgctggacttcacggcgaccgcggaccagacgcgggtggtgttcgtcagcatgggctacatcatgaagcccgacggcacgctctgtggaccggtcgtcgacgacgtctcgctagtctgcacgcggaaccatcctgctcgccgcttgcttctgtga

SEQ ID NO: 24 - protein, 379 aa, Sorghum bicolor
MGRGSETVPNARRAALFLIVCLAARAASAIQDGLLPNGNFEEAPPKSQLKGSRVMGRNAIPHWEISGFVEYIGSGQKQGDMLLPVPEGAYAVRLGNEASIQQRLALTQGAHYSITFSAARTCAQAEQLNVTVAPESDILPIQTVYTSSGWDSYSWAFKATSSVVSLIIHNPGVAEDAACGPLIDLFAIKTLPTPQSSKNNLLKNGDFEEGPYIFPNTRWGVLVPPMDEDDYSPLSPWMILSSTKSVKYVDAPHHVVPHGARAVELVSGMETALVQNATTVPGLPYRLQFSAGDAGNGCVGSMAVQAYAGGKSVKAQFQSQGKGGHKRGVLDFTATADQTRVVFVSMGYIMKPDGTLCGPVVDDVSLVCTRNHPARRLLL

SEQ ID NO: 25 - DNA, 1125 bp, Sorghum bicolor
atggtgcagaacgctccccacgctgcgctgttcttgctcgtcgccttggctgcccgagcagcttcggccatcccggacggcctgctgccgaacggcaacttcgaggaggcgccggcgaaatcggagctcaacggcacgcgggtgaaggggcgcgacgcgatcccgcactgggagatctccgggttcgtggagtacatcgggcccggccagaagcagggggacatgatcctcccggtgccggagggcgcctacgccgtgcggctggggaacgaggcctccatccagcagcggctcgccgtgacgcagggcgcgcgctactccgtcaccttcagcgcggcgcgcacctgcgcccaggccgagcagctcaacgtcacggtcgccaccgactccgacgtgctccccatccagacggtgtacacgagcagtggctgggactcctactcctgggccttcgaggctacgcgcagcgccgtgacgctcatcgtccataaccccggcgtcactgaagacccggcctgcggccctctcctcgacgcgtttgccatcaagactctccagcctcctcctgtgctcgccaaaaataacatgatccagaacggggacttcgaggagggtccgtacatcttccccgacgcgccgtggggggtgctggtgccgccaatggacgaggacgactactcgccgttgtcgccatggatgatcctgtcgacgaccaagtccgtcaagtacctggacgcggcgcactacgccgtgccgcacggcgcgcgcgccgtggagctgctgtccggcgtggagaccgcactggcgcaggacgtggccaccgtggccgggcggccgtacaggctcgagttctccaccggggacgccggggacgggtgctccggctcgttgtccctgcgggcatatgcggcgagcggtagcgtgacggtgccgcacgagtcacagggcaggggtgggcacaagcgcggcgtgctggacttcacggcgaccgcggaccggacgcgggtggcgttcgtcagtatggcctacaccatgaagagcgacgggacgctctgtgggcccgtcctcgacgatgtctcgctcgtcggcttgcacagccgtgctgctcgccggttccttctgtag

SEQ ID NO: 26 - protein, 374 aa, Sorghum bicolor
MVQNAPHAALFLLVALAARAASAIPDGLLPNGNFEEAPAKSELNGTRVKGRDAIPHWEISGFVEYIGPGQKQGDMILPVPEGAYAVRLGNEASIQQRLAVTQGARYSVTFSAARTCAQAEQLNVTVATDSDVLPIQTVYTSSGWDSYSWAFEATRSAVTLIVHNPGVTEDPACGPLLDAFAIKTLQPPPVLAKNNMIQNGDFEEGPYIFPDAPWGVLVPPMDEDDYSPLSPWMILSTTKSVKYLDAAHYAVPHGARAVELLSGVETALAQDVATVAGRPYRLEFSTGDAGDGCSGSLSLRAYAASGSVTVPHESQGRGGHKRGVLDFTATADRTRVAFVSMAYTMKSDGTLCGPVLDDVSLVGLHSRAARRFLL

SEQ ID NO: 27 - DNA, 1137 bp, Sorghum bicolor
atggcggagagcgggagctcacgtcgtggcgtgctgctgttcttgctcgtcggcgtggctgcggctggagtggcttcggccatccctgacgggctactgccaaacggtaacttcgagcaaggtccggacaagtcccagatgaacgggtccagggtgattggtcaaaactccataccctgctgggagacctcaggtttcgtggagtacatcgagcccgggcagcagcagaacgacatggtcctggtggtgcctgagggcgcacgggccgttcgcctcggcaacgacgcgaccatccggcagcagcttccaggcctgacccgcagcatgtcctactccatcaccttcagcgcggcgcgcacctgcgcccaggccgagcagctcaacgtgtccgtcgccgcggagtccggcgtcctccctgtccagaccgtgtacaccagcagcggctgggactcctactcctacgccttcaaggccaggcacaccgccgtgtggctcaccatccacaaccccggcgtcgaggaggacccggcgtgcggccccatcatcgattccgtcgccatcaaggccctccaccctcccagccgcgtcaaggacaatatgctgaagaacggagactttgaggagggcccgtacatgttcccggacttggcatggggcgtgctggtgccgccgatggacgaggacgacgtgtctccgctgccggggtggatgatcatgtcggacaccaaggccgtcaagtacctggacgcggcgcacttcgccgtgccgcacggcgcgtacgccgtggagctggtggccggcacggaggccgcgctggtgcaggaggtgcagaccaagcccgggcggtcatacaagctgtccttctccgtcggggacgcggccaacgggtgcgcgagcacgctgctcgtggacgcgtacgcggcgcggggcaggcagccggtctcgtacgagtcccacggcatgggcgggtgcgtgcgcagcgagttggagttcgcagcggtggcaaacctcacccgtgtggtgttccagagcatgggccactacatgaagcccgacgggacgctctgcgggccggtcgtggacgacgtctccctcgtcagcctgcccagacacgcagcccgccggttgctcatgtag

SEQ ID NO: 28 - protein, 378 aa, Sorghum bicolor
MAESGSSRRGVLLFLLVGVAAAGVASAIPDGLLPNGNFEQGPDKSQMNGSRVIGQNSIPCWETSGFVEYIEPGQQQNDMVLVVPEGARAVRLGNDATIRQQLPGLTRSMSYSITFSAARTCAQAEQLNVSVAAESGVLPVQTVYTSSGWDSYSYAFKARHTAVWLTIHNPGVEEDPACGPIIDSVAIKALHPPSRVKDNMLKNGDFEEGPYMFPDLAWGVLVPPMDEDDVSPLPGWMIMSDTKAVKYLDAAHFAVPHGAYAVELVAGTEAALVQEVQTKPGRSYKLSFSVGDAANGCASTLLVDAYAARGRQPVSYESHGMGGCVRSELEFAAVANLTRVVFQSMGHYMKPDGTLCGPVVDDVSLVSLPRHAARRLLM

SEQ ID NO: 29 - DNA, 1143 bp, Sorghum bicolor
atggcgggccgcacgaggtcacgttgccccgtgctgctgctcttcctcgtcggtgtggctgctcgagtggcttcaggcgtcgtcaccgacggcctattaccaaatggcaattttgagttcggaccggccaagtcggatctgaacggcactagggtaatgggtcaaaactccataccgaactgggagatctccgggttcgtggagtacatcgggtccgggcagcagcaggacgacatgatcctcccggtgccggaaggcgcatacgccgtgcgtctgggcaacgacgcaaccatccggcagaagctaagcgtgaaccggaagacgacctactccatcaccttctgcgcggcgcgcacctgcgcgcaggccgagcagctcaacgtgtccgtcgccgcggagtccggcgtcctcccggtccagaccgtgtacaccagcagcgggtgggactcctactcctacgccttcagagccaggcacagcaccgcgtggctcaccatccacaaccccagccacgaggacgacccggcgtgcggccccctcatcgactccgttgccatcaaggccctcaacccgccgcatcataccaagggtaacttgctgaggaacggagacttcgaggaggggccgttcatcttcccgggcacggcgtggggcgtgctggtgccgccgatggacgaggacgacgtgtcaccgctgccagggtggatggtcatgtcggacaccaaggtggtcaagtacgtggacgcggcgcaccacgcggtgccgcgcggcgcgcgcgccgtggagctggtggccggcagggaggccgcgctggtgcaggaggtccgcggcaccgtgcccggccggcgctaccgcttgtcgttctcggtcggggacgcggggaacgggtgcgaggggtccttggccgtggaggcgtacgcggcgcgggcgacggcgagggcgacgtacgagtcccgcggaaccggcgggagcataaagcgcgccgcggtcgtcgagttcgcggcgatcgcgaacctcacgcgcgtggtgtttcagagctacaaccaccacatgaagcccgacggcacgctctgcgggccggtcgtggacgacgtctccctcgtcggcctgcgcaagcacgccgcgcgccggctattcttgtag

SEQ ID NO: 30 - protein, 380 aa, Sorghum bicolor
MAGRTRSRCPVLLLFLVGVAARVASGVVTDGLLPNGNFEFGPAKSDLNGTRVMGQNSIPNWEISGFVEYIGSGQQQDDMILPVPEGAYAVRLGNDATIRQKLSVNRKTTYSITFCAARTCAQAEQLNVSVAAESGVLPVQTVYTSSGWDSYSYAFRARHSTAWLTIHNPSHEDDPACGPLIDSVAIKALNPPHHTKGNLLRNGDFEEGPFIFPGTAWGVLVPPMDEDDVSPLPGWMVMSDTKVVKYVDAAHHAVPRGARAVELVAGREAALVQEVRGTVPGRRYRLSFSVGDAGNGCEGSLAVEAYAARATARATYESRGTGGSIKRAAVVEFAAIANLTRVVFQSYNHHMKPDGTLCGPVVDDVSLVGLRKHAARRLFL

SEQ ID NO: 31 - DNA, 1116 bp, Sorghum bicolor
atggtcgctcgacgatccgtggcgttcgtcatactcctcatcgccgtggccgctcgagcggtttttgccatcaccgaaggcctgctaccaaacggtcattttgagcaaggaccagccaagtcggagatgaacggcaccagggtgctaggccgctactccataccgcactgggagatttcagggttcctggagtacatcgagtccggccagaaacaggacgacatgctcctccaggtcccggaaggcgagcgcgccgtgcggctgggcaacgacgccaccatccagcagcagctagcagtgacccggcacacgtactactccatcaccttctccgcgtcgcgcacctgcgcccaggccgagaagctgaacgtgtcggtcaccccggagtccggcgtcctccccatccagacggtgtacaccagcagcggctgggactcctactcctgggccttcaaggccaggcacagcaccgtgtggctctccatccacaaccccggccacgaggagaacccggcgtgcggccccctcatcgaccgcgtcgccgtcaagaccctccgctctccccatcacgtcaagaacaacatgttgaggaacggggacttcgaggacgggccctacatcttcgcggacacgccgtggggcgtgctggttccgccgatcacggaggacgagcactcgccgctgcctgggtggatgatcatgtcggacaccaaggtcgtcaagtacgtggacgcgccgcaccacgcggtgccgcgcggcgcgggcgccgtggagctggtcgccggcagggagtgcgcgctggtgcaggaggtgcgcaccgtgccccgccgctcgtacaagctgtccttcgccgtcggggacgcggccaacgggtgcgaagggaacctggccgtggacgtgtccgcggggcgcgccgcgaagctgaacgtgccgtacgagtcccacggcacgggcgggtacaagcgcgccgagctcgagttcgtggcgaccgacaatctgacgcgcgtcgtgttccagagcgccaaccactacaccaagtcggacgcgacgctctgcggccccatcatcgatgatgttcggctcgtccccgtgcacgcccgccggcggcgtatgtag

SEQ ID NO: 32 - protein, 371 aa, Sorghum bicolor
MVARRSVAFVILLIAVAARAVFAITEGLLPNGHFEQGPAKSEMNGTRVLGRYSIPHWEISGFLEYIESGQKQDDMLLQVPEGERAVRLGNDATIQQQLAVTRHTYYSITFSASRTCAQAEKLNVSVTPESGVLPIQTVYTSSGWDSYSWAFKARHSTVWLSIHNPGHEENPACGPLIDRVAVKTLRSPHHVKNNMLRNGDFEDGPYIFADTPWGVLVPPITEDEHSPLPGWMIMSDTKVVKYVDAPHHAVPRGAGAVELVAGRECALVQEVRTVPRRSYKLSFAVGDAANGCEGNLAVDVSAGRAAKLNVPYESHGTGGYKRAELEFVATDNLTRVVFQSANHYTKSDATLCGPIIDDVRLVPVHARRRRM

SEQ ID NO: 33 - DNA, 1020 bp, Triticum aestivum
atgcgttgcgccgtgctgctcctgctcgtcttcgcggcggcgcgcgccgccgcggtcgtcaccgacgggctcctgccgaatggcaacttcgagttgggtccggccaagtcggagctggtgaacggcacggtggtgaagggcggcaaggcgatccccaagtgggagacgtcgggcttcgtggagtacatcgagtccgggcacaagcagggcgacatgctgctggtggtgccgcagggcgcctacgccgtccgcctcggcaacgacgcctccatcctccagcgcatccccgtcgcccggggctcctactacgccatcaccttcagcgccgcccgcacctgcgcgcaggccgagcgcctcaacgtctccgtcagccccgagtccggcgtgctccccatgcagaccatctacggcagcaacggctgggactcctacgcctgggccttcaaggccaagctcgacgtcgtggagctcgtcatccacaaccccggcgtcgaggaggaccccgcctgcggcccgctcatcgacgccgtcgccatccgcacgctctacccgcccacgctctccaagggcaacatgctcaagaacggcggcttcgaggagggcccctacttcctccccaacgcctcctggggcgtgctcgtgccgcccaacatcgaggacgaccactccccgctccccgcctggatgatcatgtcctccaaggccgtcaagtacgtcgacgccgcgcacttcaaggtgcccgagggcgcccgcgccgtcgagctcgtcggcggcaaggagagcgcgctcgtccaggaggtgcgcaccgtgcctggctgggcctaccgcctctccttcgccgtcggcgactccgccgacgctgcaagggctccatggtggccgaggcctacgccgcgcgctccaccctcaaggtgccgtacgagtccaacggcgccggcggctacaagcgcgccgtgctggacttcgtcgccgtcagggaccgcacccgggtcgtcttccagagcgccttctaccacatga

SEQ ID NO: 34 - protein, 339 aa, Triticum aestivum
MRCAVLLLLVFAAARAAAVVTDGLLPNGNFELGPAKSELVNGTVVKGGKAIPKWETSGFVEYIESGHKQGDMLLVVPQGAYAVRLGNDASILQRIPVARGSYYAITFSAARTCAQAERLNVSVSPESGVLPMQTIYGSNGWDSYAWAFKAKLDVVELVIHNPGVEEDPACGPLIDAVAIRTLYPPTLSKGNMLKNGGFEEGPYFLPNASWGVLVPPNIEDDHSPLPAWMIMSSKAVKYVDAAHFKVPEGARAVELVGGKESALVQEVRTVPGWAYRLSFAVGDSADAARAPWWPRPTPRAPPSRCRTSPTAPAATSAPCWTSSPSGTAPGSSSRAPSTT

SEQ ID NO: 35 - DNA, 1146 bp, Zea mays
atgcgccgcgtcgcgctgttgctcgtcgccgccgtgtgcgcgctggcggcgccggctgccgcggtcgtcactgacggtcttctcccgaacggcaacttcgaggatggcccgcccaagtcggcgctggtgaacggcacggtggtgtcgggcgcccacgccatcccgcggtgggagacgtccggcttcgtggagtacatcgagtcggggcacaagcagggggacatgctgctggtggtgccgcagggcgcgcacgcggtgcggctgggcaacgaggcgtcgatccggcagcgcctggccgtggcgcgcggcgcctactacgccatcacgttcagcgcggcgcggacgtgcgcgcaggcggagcggcagcggctgaacgtgtcggtgagccccgagtggggcgtgctgccgatgcagaccatctacggcagcaacggctgggactcgtacgcctgggcattcaaggcgaagatggacgcggtgacgctggtcatccacaacccgggcgtggaggaggacccggcctgcggcccgctcatcgacggcgtcgccatccgtgcgctgtacccgcccgcgctcgccaggcgggcggggggaaacaacctgctcaagaacggcgggttcgaggagggcccctacttcctgcccggcgcgtcctggggcgtgctcgtcccgcccaacatcgaggacgaccactcgccgctccccgcctggatgatcgtctcgtccaaggccgtcaagtacgtggacgccgcgcacttcgccgtgccccagggcgcgcgcgccgtcgagctggtgggcggccgggagagcgcgctcgtgcaggaggtccgcaccgtgcctgggtggacctaccgcctcgccttcgccgtgggagactcgggcgacggctgcgcgggctccatggccgccgaggcctacgcggcgcgcgccacggtcaaggtgccctaccagtccaggggcaccggaggatacaagcgcgccgtgctggacttcacggccatcgccaaccgcacccgcgtcgtcttccagagcaccttctaccacatgaagcccgacggcacgctctgcggcccgctcgtcgacgacgcctcgctcgtcggcctgcgcaagaagaagcccgcgcgccgcctcatgcagctcctgtaa

SEQ ID NO: 36 - protein, 381 aa, Zea mays
MRRVALLLVAAVCALAAPAAAVVTDGLLPNGNFEDGPPKSALVNGTVVSGAHAIPRWETSGFVEYIESGHKQGDMLLVVPQGAHAVRLGNEASIRQRLAVARGAYYAITFSAARTCAQAERQRLNVSVSPEWGVLPMQTIYGSNGWDSYAWAFKAKMDAVTLVIHNPGVEEDPACGPLIDGVAIRALYPPALARRAGGNNLLKNGGFEEGPYFLPGASWGVLVPPNIEDDHSPLPAWMIVSSKAVKYVDAAHFAVPQGARAVELVGGRESALVQEVRTVPGWTYRLAFAVGDSGDGCAGSMAAEAYAARATVKVPYQSRGTGGYKRAVLDFTAIANRTRVVFQSTFYHMKPDGTLCGPLVDDASLVGLRKKKPARRLMQLL

SEQ ID NO: 37 - DNA, 1128 bp, Zea mays
atggaggggcgcgcgagctcacgtcgcggcgtgctgctgttcttgctcgtcggcgtggcttcggccaatcctgacgggctactaccaaacggcaacttcgagcaaggtccagacaagtaccagatgaacgggacctgggtgattggccgcaaatccataccctgctgggagatctcagggttcgtggagtacatcgtgtccgggcagcagcaggacaacggcatggtcgtggcggtgcccgagggcgcacgggccgtgcggctgggcaacgacgcgagcatccggcagcggcttacagggatgacccggggcacgtcctactccgtcaccttcagcgcgtcgcgcacctgcgcccaggccgagcagctgaacgtgtcggtcgccccggagtccggcgtcctccccatccagaccgtgtacaccagcagcgggtgggactcctactcctacgccttcagggccaggcactccgccgcgtggctcgtcatccacaaccccggcgtcgaggaggacccggcgtgcggccccgtcatcgactccgttgccatcaaggcactccaccctcccagtcgcaccgccaaggacaatatgctgaaaaacggagacttcgaggagggcccgtacgtgttcccggacaccccgtggggcgtgctggtgccgccgatggacgaggacgacgtgtccccgctgccggggtggacggtcatgtccgacaccaaggccgtcaagtacctcgacgcggcgcacttcgccgtgccgcgcggctcgcgcgccgtggagctggtggccggcacggaggccgcgctggtgcaggaggtgcggacgacacccgggcggtcctacacgctgtccttctccgccggggacgcggccgacgggtgcgcgggcgccctgcgcgtggacgcgtacgcggcgcggggcaggctgccggtctcgtacgagtcccgcggcacgggcgggttcgtgcgcaacgagctggagttcgccgcggtggcgaacctcacccgcgtcgtcttccagagcatgggccactacatgaagcccgacgggacgctctgcgggccggtcgtcgacgatgtctccctagtcgccgtgcacaaacacgctgcccgccggttgttcatgtag

SEQ ID NO: 38 - protein, 375 aa, Zea mays
MEGRASSRRGVLLFLLVGVASANPDGLLPNGNFEQGPDKYQMNGTWVIGRKSIPCWEISGFVEYIVSGQQQDNGMVVAVPEGARAVRLGNDASIRQRLTGMTRGTSYSVTFSASRTCAQAEQLNVSVAPESGVLPIQTVYTSSGWDSYSYAFRARHSAAWLVIHNPGVEEDPACGPVIDSVAIKALHPPSRTAKDNMLKNGDFEEGPYVFPDTPWGVLVPPMDEDDVSPLPGWTVMSDTKAVKYLDAAHFAVPRGSRAVELVAGTEAALVQEVRTTPGRSYTLSFSAGDAADGCAGALRVDAYAARGRLPVSYESRGTGGFVRNELEFAAVANLTRVVFQSMGHYMKPDGTLCGPVVDDVSLVAVHKHAARRLFM

SEQ ID NO: 39 - DNA, 1140 bp, Zea mays
atggacacccgtcgaagcatacatagtctatacaactacaacgaagcaagtacatttggccaagaaagacaaaacagcgatgcaaatacatgtgatggccgtggaatctacccagatctggttaaatgaagcccgagcattcgagttcgagcacactcacagccattcacattaacccatgaacgaatcttgtcggtagcatcacagaagcaagcggcgagcaggatggttccgcgtggagacaagcgagacgtcgtcgacgacgggtccgcagagcgtgccgtcgggcttcatgatgtagcccatgctgacgaacaccaccctggtctggtccgcgaccgccgcgaagtccagcacgccgcgcgtgtggccgcccttgccctgggactggtacggcaccttcacgctgccccgcgcggcgtacgcctggacggtcatggagcccacgcagccgttgccggcgtccccggccgagaactggagcctgtagagctgtccgggaacggtggccacgttctgcaccagcgctgtctccatgccggacaccagctccacggcgcgggcgccgtgcggcacggcgtggtgcggcgcgtccacgtacttcaccgacttggtggacgacaggaccatccacggggccagcggggagtagtcgtcctcgtccatcggcggcaccagcaccccccactgcgtgttggggaagatgtacgggccgtcctcgaagtccccgttcttcagcatattattcttgctgctccgaggagtcggcatggtcttaatggcaaacagatcgatgagggggccgcaggctgcgtcctcggcgacgccggggttgtggacgatcagggtgacgacgctgcccgcggcctggaaggcccaggagtaggagtcccagccgctgctggtgtagaccgtctggatcgggagtacgtccgactcgggggcgaccgtcacgttgagctgctcggcctgggcgcaggtgcgcgccgcgctgaaggtgatggagtagcgcgcgcccggcgtcacggcgagtcgctgctggatggatgcctcgttcccgagccgcacggcgtaggcgccctccggcaccggcagcagcatgtcgccctgcttctggcccgacccgatgtactccacgta

SEQ ID NO: 40 - protein, 379 aa, Zea mays
MGRGSDAVPDARRAALLLIVCLVARAASAIQDGLLPNGNFEEAPPKSQLNGTRVMGRNAIPHWEISGYVEYIGSGQKQGDMLLPVPEGAYAVRLGNEASIQQRLAVTPGARYSITFSAARTCAQAEQLNVTVAPESDVLPIQTVYTSSGWDSYSWAFQAAGSVVTLIVHNPGVAEDAACGPLIDLFAIKTMPTPRSSKNNMLKNGDFEDGPYIFPNTQWGVLVPPMDEDDYSPLAPWMVLSSTKSVKYVDAPHHAVPHGARAVELVSGMETALVQNVATVPGQLYRLQFSAGDAGNGCVGSMTVQAYAARGSVKVPYQSQGKGGHTRGVLDFAAVADQTRVVFVSMGYIMKPDGTLCGPVVDDVSLVSTRNHPARRLLL

SEQ ID NO: 41 - DNA, 1287 bp, Zea mays
atgcgtctgacgatcagcgcgaggccggtgagcctgagccccccaccgacagagcagcagaaccaacagactgcaacatctggtgctgcgctgccatgcaacgtgcaccctgccagtgtcagctcaaaagactgcaacatctgttgctcccaccggcccaccaccagacccatcacgatacatacaactgacacgaaatgcaatgcaaatggtgcaggtcttctcccgaacggcaacttcgaggatggcccgcccaagtcggcgctggtgaacggcacggtggtgtcgggcgcccacgccatcccgcggtgggagacgtccggcttcgtggagtacatcgagtcggggcacaagcagggggacatgctgctggtggtgccgcagggcgcgcacgcggtgcggctgggcaacgaggcgtcgatccggcagcgcctggccgtggcgcgcggcgcctactacgccatcacgttcagcgcggcgcggacgtgcgcgcaggcggagcggcagcggctgaacgtgtcggtgagccccgagtggggcgtgctgccgatgcagaccatctacggcagcaacggctgggactcgtacgcctgggcattcaaggcgaagatggacgcggtgacgctggtcatccacaacccgggcgtggaggaggacccggcctgcggcccgctcatcgacggcgtcgccatccgtgcgctgtacccgcccgcgctcgccaggcgggcggggggaaacaacctgctcaagaacggcgggttcgaggagggcccctacttcctgcccggcgcgtcctggggcgtgctcgtcccgcccaacatcgaggacgaccactcgccgctccccgcctggatgatcgtctcgtccaaggccgtcaagtacgtggacgccgcgcacttcgccgtgccccagggcgcgcgcgccgtcgagctggtgggcggccgggagagcgcgctcgtgcaggaggtccgcaccgtgcctgggtggacctaccgcctcgccttcgccgtgggagactcgggcgacggctgcgcgggctccatggccgccgaggcctacgcggcgcgcgccacggtcaaggtgccctaccagtccaggggcaccggaggatacaagcgcgccgtgctggacttcacggccatcgccaaccgcacccgcgtcgtcttccagagcaccttctaccacatgaagcccgacggcacgctctgcggcccgctcgtcgacgacgcctcgctcgtcggcctgcgcaagaagaagcccgcgcgccgcctcatgcagctcctgtaa

SEQ ID NO: 42 - protein, 428 aa, Zea mays
MRLTISARPVSLSPPPTEQQNQQTATSGAALPCNVHPASVSSKDCNICCSHRPTTRPITIHTTDTKCNANGAGLLPNGNFEDGPPKSALVNGTVVSGAHAIPRWETSGFVEYIESGHKQGDMLLVVPQGAHAVRLGNEASIRQRLAVARGAYYAITFSAARTCAQAERQRLNVSVSPEWGVLPMQTIYGSNGWDSYAWAFKAKMDAVTLVIHNPGVEEDPACGPLIDGVAIRALYPPALARRAGGNNLLKNGGFEEGPYFLPGASWGVLVPPNIEDDHSPLPAWMIVSSKAVKYVDAAHFAVPQGARAVELVGGRESALVQEVRTVPGWTYRLAFAVGDSGDGCAGSMAAEAYAARATVKVPYQSRGTGGYKRAVLDFTAIANRTRVVFQSTFYHMKPDGTLCGPLVDDASLVGLRKKKPARRLMQLL

SEQ ID NO: 43 - DNA, 1140 bp, Zea mays
atgggaaggggaagcgatgcagtgccggacgcccgtcgagctgcgctgctcttgatcgtctgcttggcggctcgagcggcttctgcgatccaggatggcctgttgccgaacggcaacttcgaggaggcgccgcccaagtcgcagctcaacggcacgagggtgatggggcgcaacgcgataccgcactgggagatctccgggtacgtggagtacatcgggtcgggccagaagcagggcgacatgctgctgccggtgccggagggcgcgtacgccgtgcggctggggaacgaggcatccatccagcagcgcctcgccgtgacgccgggcgcgcgctactccatcaccttcagcgcggcgcgcacctgcgcccaggccgagcagctcaacgtgacggtcgcccccgagtcggacgtactcccgatccagacggtctacaccagcagcgggtgggactcctactcctgggccttccaggccgcgggcagcgtcgtgaccctgatcgtccacaaccccggcgtcgccgaggacgcagcctgcggccccctcatcgatctgtttgccattaagaccatgccgactcctcggagcagcaagaataatatgctgaagaacggggacttcgaggacggtccgtacatcttccccaacacgcagtggggggtgctggtgccgccgatggacgaggacgactactccccgctggccccgtggatggtcctgtcgtccaccaagtcggtgaagtacgtggacgcgccgcaccacgccgtgccgcacggcgcccgcgccgtggagctggtgtccggcatggagacagcgctggtgcagaacgtggccaccgttcccggacagctctacaggctccagttctcggccggggacgccggcaacggctgcgtgggctccatgaccgtccaggcgtacgccgcgcggggcagcgtgaaggtgccgtaccagtcccagggcaagggcggccacacgcgcggcgtgctggacttcgcggcggtcgcggaccagaccagggtggtgttcgtcagcatgggctacatcatgaagcccgacggcacgctctgcggacccgtcgtcgacgacgtctcgcttgtctccacgcggaaccatcctgctcgccgcttgcttctgtga

SEQ ID NO: 44 - protein, 379 aa, Zea mays
MGRGSDAVPDARRAALLLIVCLAARAASAIQDGLLPNGNFEEAPPKSQLNGTRVMGRNAIPHWEISGYVEYIGSGQKQGDMLLPVPEGAYAVRLGNEASIQQRLAVTPGARYSITFSAARTCAQAEQLNVTVAPESDVLPIQTVYTSSGWDSYSWAFQAAGSVVTLIVHNPGVAEDAACGPLIDLFAIKTMPTPRSSKNNMLKNGDFEDGPYIFPNTQWGVLVPPMDEDDYSPLAPWMVLSSTKSVKYVDAPHHAVPHGARAVELVSGMETALVQNVATVPGQLYRLQFSAGDAGNGCVGSMTVQAYAARGSVKVPYQSQGKGGHTRGVLDFAAVADQTRVVFVSMGYIMKPDGTLCGPVVDDVSLVSTRNHPARRLLL

SEQ ID NO: 45 - DNA, 1194 bp, Zea mays
atggcgatcgatgagcggagcgtgcacggcggcgccgcactggtcctgcggctgctggtctgcgtcgtcgcggcgcgggctgtctcggccgtcgccgatggtcctctgctgaacggcaacttcgaggacccgccgaaccagtcccagatgagcgggtcggtggtgaccggggagcacgcggtctcctactggaagacgtccggccacatcgagttcatatgctccggccagaagcagggggacatggtcctgacggtgccggacggctcgcacgcgctgcggctgggcagcggcgcctccatccagcagcagatcagcctcacgaagggcctgtactactccctcacgttcagcgcgtcgcgcacctgctcccagaacgagatgctcaacgtgacggccgcccccgtgtccggctcccccgcccagaccggcgagctccccacccagacggtgtacaccagcagcggctgggactcctactcctgggccttcagggcggaggccggtctcatgtccatcacagtcacccacaactgcggagaagaggaagatcccgcgtgcggccccatcgtcgacgcctttgccatcaagacgctcagccagcctgaggccagccagaataacatgctgaggaacggggacttcgaggagggcccgtacatcccgccggactcgcagtggggagtgctggtgccgccggtggacgaggacgacgtctccccgctgcccgggtggaatatcatggcgtacaagaagtcggtcaagtacatagactcggcgcacttcgcggtgccgcgcggcgcgcgcgccgtggagctggtgtccggcgtggagaccgcgctcctgcaggaggtgtacaccaccgtggaagggagctggtacaggctggagttctcggccggggacgccgacgggtgcgcgtcgtcgtatgatgacggctcctcgtccgggatgaaggtgaaggcgtacgcggggacggccgaaacgaccgtggacgtcgatttccgcgacgccggcggttccaagcgcgggaagatcgagttcagggccaccgccagccccaccagggtggtgttcgtcagcttgggctaccacaccaagtccgacaacagcggcacgctctgcggtcccgtcgtagacgacgtctcgcttgtccccataccgcagccgtatgctcgccgcctgcttctataa

SEQ ID NO: 46 - protein, 397 aa, Zea mays
MAIDERSVHGGAALVLRLLVCVVAARAVSAVADGPLLNGNFEDPPNQSQMSGSVVTGEHAVSYWKTSGHIEFICSGQKQGDMVLTVPDGSHALRLGSGASIQQQISLTKGLYYSLTFSASRTCSQNEMLNVTAAPVSGSPAQTGELPTQTVYTSSGWDSYSWAFRAEAGLMSITVTHNCGEEEDPACGPIVDAFAIKTLSQPEASQNNMLRNGDFEEGPYIPPDSQWGVLVPPVDEDDVSPLPGWNIMAYKKSVKYIDSAHFAVPRGARAVELVSGVETALLQEVYTTVEGSWYRLEFSAGDADGCASSYDDGSSSGMKVKAYAGTAETTVDVDFRDAGGSKRGKIEFRATASPTRVVFVSLGYHTKSDNSGTLCGPVVDDVSLVPIPQPYARRLLL

SEQ ID NO: 47 - DNA, 1227 bp, Zea mays
atggtgatcgataggcggagcgtgcagcgcgccgcgctggtcgtcctgccgctggtgctcttcgtcgcggcgcgggctgtctctgccgtcggcgatggtcctctgcagaacggcaacttcgaggactcgccagaccagtcccagatgagcggctcggtggtggccggggagcacgcgatctccggctggaagacgtccggccacatcgagctcgtatgctcgggccagaagcagggggacatggtcctgacggtgccggacggcgcgcaggccctgcggctgggagccggcgcctccatcgagcagcagatcagcggcctcacgcagggctcgtactactccctcacgttcgccgcgtcgcgcacctgctcccaggacgagacgctcagcgtgacggccgcccccgcgccgtccggcgccggctccccggcgccggcccagaccggcgaactccccatgcagacggtgtacaccagcatcggctgggactcctactcctgggccttcagggcggagggcgccggcctcatgtccgtcgtaatcacccacaactgcgggcaggaggaagaccccgcgtgcggccccatcgtcgacgccttcgccatcaaggcgctccacgaccagccgcctgaccaggcggcggcggacaacaacatgctgcggaacgggggcttcgaggagggcccgtacatcccgccgggctcgccgtggggggtgctggtgccgccggtggacgaggaccccgtctccccgctgcccgggtggaaggtcatggcgtacaagaagtccgtcaggtacgtagactcggcgcacttcgcggtgccgcgcggcgcgcgcgccgtggagctcgtgtccggcgtcgaagccgcgctcctgcaggaggtggacaccaccgtggaagggagctggtacaggctcgagttctcggccggggacgccgccaacggctgcgcctcgtcgtctgatggttcctcgtcgtccgggatgaagctcaaggcgtacgccgggacgagtgaaaccaccgtggacatcgatttccgcggcgctggcggttccaaccgagggaagatcgagttcagggccgccgcgagccccaccagggtggtgttcgtcagcctgggctaccacaccaagtccgacaacagcggcacgctctgcgggcccgtcgtagacgacgtctcgctcgtccccataccgccgccgtatgctcgccggctgcttctctag

SEQ ID NO: 48 - protein, 408 aa, Zea mays
MVIDRRSVQRAALVVLPLVLFVAARAVSAVGDGPLQNGNFEDSPDQSQMSGSVVAGEHAISGWKTSGHIELVCSGQKQGDMVLTVPDGAQALRLGAGASIEQQISGLTQGSYYSLTFAASRTCSQDETLSVTAAPAPSGAGSPAPAQTGELPMQTVYTSIGWDSYSWAFRAEGAGLMSVVITHNCGQEEDPACGPIVDAFAIKALHDQPPDQAAADNNMLRNGGFEEGPYIPPGSPWGVLVPPVDEDPVSPLPGWKVMAYKKSVRYVDSAHFAVPRGARAVELVSGVEAALLQEVDTTVEGSWYRLEFSAGDAANGCASSSDGSSSSGMKLKAYAGTSETTVDIDFRGAGGSNRGKIEFRAAASPTRVVFVSLGYHTKSDNSGTLCGPVVDDVSLVPIPPPYARRLLL

SEQ ID NO: 49 - DNA, 1140 bp, Oryza sativa
atggcggccggctcggcgtcgctgctgctgctaatggtggtgctctgcgcggcggcgagcggaacggcgctcgccgccatcaccgacgggctgctggcgaacggcaacttcgagcgcgggccggcgccgtcgcagctgcgcgggacgcgggtggtcggcgcgtcggcgatcccgtcgtggcggacgtcggggttcgtggagtacatcccgtcggggaggaagcagggggacatggtgctggtggtccccgaggggagccacgcggtgcggctcgggaacgaggcgtcgatccggcagcggctcgccggcgcggcgcgcggcgcgcggtacgcgctcacgttcagcgcggcgcggacgtgcgcgcaggcggagcggctgaacgtgtcggcgtcggggcagtgggcggtgctccccatgcagaccatgtacagcagcaacggctgggactcgtacgcctgggcctgggatgccgccgccgacgcgttcgacgtcgtcatccacaaccccggcgtcaccgaggaccccgcctgcggccccctcatcgactccgtcgccatccgcaccctcaaccctcctcgccgcaccaacaagaacctggtgaagaacggggacttcgaggagggcccgtacatcatcccggggactaggtggggggtgctgatcccgtccatggtggtggacgagcactcgccgctgccggggtggatggtggagtcgctcaaggcggtgaagtacatcgacagcgaccacttcgcggtgccgcgcgggcggcgcgctgtcgagctgctggcggggcgggagagcgcgatcgcgcaggtgatccgcaccgtccccgggaggcagtacgcgctgtcgttcaccgtcggcgacgccagcaacggctgcgaggggtcgctggtggtggaggcgtacgccgggagggagtccaccagggtggcgcacgagtcggctggccgcggcggcgccgccaagcgcgccgtgctgccgttccgcgccgccgcggcgcgcacccgcgtcgtgttcttcagctcgttctacagcaccaggagcgacgacatgagctcgctctgcgggccggtgatcgacgacgtcgccgtcgtcagcgtgcgcgcgcggcggccggcggcgaagcgcggctag

SEQ ID NO: 50 - protein, 379 aa, Oryza sativa
MAAGSASLLLLMVVLCAAASGTALAAITDGLLANGNFERGPAPSQLRGTRVVGASAIPSWRTSGFVEYIPSGRKQGDMVLVVPEGSHAVRLGNEASIRQRLAGAARGARYALTFSAARTCAQAERLNVSASGQWAVLPMQTMYSSNGWDSYAWAWDAAADAFDVVIHNPGVTEDPACGPLIDSVAIRTLNPPRRTNKNLVKNGDFEEGPYIIPGTRWGVLIPSMVVDEHSPLPGWMVESLKAVKYIDSDHFAVPRGRRAVELLAGRESAIAQVIRTVPGRQYALSFTVGDASNGCEGSLVVEAYAGRESTRVAHESAGRGGAAKRAVLPFRAAAARTRVVFFSSFYSTRSDDMSSLCGPVIDDVAVVSVRARRPAAKRG

SEQ ID NO: 51 - DNA, 1116 bp, Panicum virgatum
atgggaaggtcatccatggctgggccggcgatgcttctgctgctctgcacagtgtgcagactggcgctcggaattactgacgggctgctcccgaacggcaacttcgagcgcgggccggtgccgtcgcagctgcgggggacgcgggtgctgggctcgtcggcgatcccgtcgtggcagacgtcggggttcgtggagtacatcccgtcggggaagaagcagggggacatgctgctggtggtgccggagggcgcctacgccgtgcggctcgggaacgaggcgtcgatccgacagcggctccgcggcgccgcccgcggcgcgcgctactcgctgacgttcagcgcggcgcggacgtgcgcgcaggcggagcagctcaacgtgtcggcgtccgggcagtcgggcctgctggccatgcagaccatgtacagcagcaacgggtgggactcgtacgcctgggcctgggtcgccgacgctggcgaggtcgacgtcgtcatccacaaccccggcgtcaccgaggaccccgcctgcggcccgctcatcgactccgtcgccatcaagacgctcaacccgccgcgccgcacgaacaggaacctggtgaagaacggcgacttcgaggagggcccgtacatcatcccggggaccaggtggggcgtgctgatcccgtcgcgcgtggtggacgaccactcgccgctgcccgggtggatggtggagtcgctcaaggccgtcaagtacatcgacggcggcagcttcgcggtgccgcgggggcggcgcgccgtggagctgctggcggggagggagagcgcggtggcgcaggtgatccgcaccgtgccggggcggcgctacgcgctgtccttcacggtgggggacgccggcaacgcctgccgcgggtcgctcatggtggaggcctacgcggggcgggagtccaccaaggtggcgtacgagtcggcggggaagggcggcgtgaagcgcgccgtgctgccgttccgcgctgcctccgcgcgcacgcgcatcgtcttcttcagctccttctacagcaccaggagcgacgacctcagctcgctctgcgggcccgtcctcgacgacgtcgccgtcgtcagcgtgcgggcgaagcgcggctag

SEQ ID NO: 52 - protein, 371 aa, Panicum virgatum
MGRSSMAGPAMLLLLCTVCRLALGITDGLLPNGNFERGPVPSQLRGTRVLGSSAIPSWQTSGFVEYIPSGKKQGDMLLVVPEGAYAVRLGNEASIRQRLRGAARGARYSLTFSAARTCAQAEQLNVSASGQSGLLAMQTMYSSNGWDSYAWAWVADAGEVDVVIHNPGVTEDPACGPLIDSVAIKTLNPPRRTNRNLVKNGDFEEGPYIIPGTRWGVLIPSRVVDDHSPLPGWMVESLKAVKYIDGGSFAVPRGRRAVELLAGRESAVAQVIRTVPGRRYALSFTVGDAGNACRGSLMVEAYAGRESTKVAYESAGKGGVKRAVLPFRAASARTRIVFFSSFYSTRSDDLSSLCGPVLDDVAVVSVRAKRG

SEQ ID NO: 53 - DNA, 1095 bp, Sorghum bicolor
atggccgtgccagtgatgcttctgctgctgtgcgcaacgtgcagactggcgcttggaattactgacggtctgctcccgaacggcaacttcgagcggggcccggcgccgtcgcagctgcgcgggacgcgggtgatgggctcgtcggcgatcccggcgtggcagacgtcggggttcgtggagtacatcccgtcggggcggaagcagggggacatggtgctggtggtgcccgagggcgcctacgccgtgcggctcgggaacgaggcctccatccggcagcggctccacggcgccgcccgcggcgcgcgctactcgctcacgttcagcgcggcgcggacgtgcgcgcaggcggagcagctcaacgtgtcggcgtcggggcagtcgggcctgctggcgatgcagaccatgtacagcagcaacggctgggactcgtacgcctgggcctgggtggccgacgccgacgaggtcgacgtcgtcatccacaaccccggcgaccccgcctgcggcccgctcatcgactccgtcgcgatcaagacgctcaacccgcctcgccggaccaacaagaacctggtgaagaacggcgacttcgaggagggcccgtacatcatcccggggacgaaatggggcgtgctgatcccgtcgagggtggtggacgaccactcgccgctgcccgggtggatggtggagtcgctcaaggccatcaagtacatcgacagcgacagcttcgcggtgccgcggggccggcgcgccgtggagctgctggccgggagggagagcgccatcgcgcaggtgatccgcaccgtgccggggcggcagtacgcgctgtccttcaccgtcggcgacgccagcaacgcctgccgtgggtcgctcatggtggaggcatacgccggccgggagtccaccaaggtggcgtacgagtcggcggggaagggcggcgtcaagcgcgccgtgctgccgttccgcgccgcgtccgcgcgcaccaggctcgtcttcttcagctccttctacagcaccaggagcgacgacctcagctcgctctgcgggccagtgctcgacgacgtcgccgtcgtcagcgtgcgcactaccaagcgcggctag

SEQ ID NO: 54 - protein, 364 aa, Sorghum bicolor
MAVPVMLLLLCATCRLALGITDGLLPNGNFERGPAPSQLRGTRVMGSSAIPAWQTSGFVEYIPSGRKQGDMVLVVPEGAYAVRLGNEASIRQRLHGAARGARYSLTFSAARTCAQAEQLNVSASGQSGLLAMQTMYSSNGWDSYAWAWVADADEVDVVIHNPGDPACGPLIDSVAIKTLNPPRRTNKNLVKNGDFEEGPYIIPGTKWGVLIPSRVVDDHSPLPGWMVESLKAIKYIDSDSFAVPRGRRAVELLAGRESAIAQVIRTVPGRQYALSFTVGDASNACRGSLMVEAYAGRESTKVAYESAGKGGVKRAVLPFRAASARTRLVFFSSFYSTRSDDLSSLCGPVLDDVAVVSVRTTKRG

SEQ ID NO: 55 - DNA, 1116 bp, Zea mays
atgggaaggctagccctggctgtgccggtgatgcttctgctgctttgcacgacgtgcagactgacgctcggaattacagacggtctgctcccgaacggcaacttcgagcggagcccgctgccgtcgcagctgcgggggacccgggtggtgggcgcgtcggcgatcccgtcgtggcagacgtcggggttcgtggagtacatctcgtcggggcagaagcagggtgacatggtgctggtggtgcccgagggcgcctacgccgtgcggctcgggaacgaggcgtccatccggcagcggctccggggcgccgcccgcggcgcgcgctactcgctcacgttcagcgcggcgcggacgtgcgcgcaggcggagcagctgaacgtttctgcgtcggggcagtcgggcctgctggccatgcagaccatgtacagcagcaacgggtgggactcgtacgcctgggcctgggtcgccaacgccgacgaggtcgacatcgtcatccacaaccccggcgtcaccgaggaccccgcctgcggcccgctcatcgattccgtcgccatcaagacgctcaacccgcctcgtcgcaccaacaagaacttggtcaagaatggtgacttcgaggagggcccgtacatcatcccggggaccaagtggggcgtgctgatcccatcgcgcgtggtggaggaccattcgccgcttccggggtggatggtggagtcgctcaaggccatcaagtacatcgacggcgagagcttcgccgtgccgcggggtcggcgcgccgtggagctgctggccgggagggagagcgcgatcgcgcaggtcatccgcaccgtgccggggcgacagtacgtgctgtccttcaccatcggcgacgccagtaacgcctgccgcggctcgctcatggtggaggcatacgcgggccgggagtccaccaaggtggcgtacgagtcggcggggaagggcggcgtgaagcgcgccgtgctgccgttccgcgccgcgtcggcgcgcaccaggctcgtctttttcagctccttctacagcaccaggagcgacgacctcagctcgctatgcgggccagtgcttgatgacgtcgtcgtcgtcagcgtgcgcacgaagcgcggctag

SEQ ID NO: 56 - protein, 371 aa, Zea mays
MGRLALAVPVMLLLLCTTCRLTLGITDGLLPNGNFERSPLPSQLRGTRVVGASAIPSWQTSGFVEYISSGQKQGDMVLVVPEGAYAVRLGNEASIRQRLRGAARGARYSLTFSAARTCAQAEQLNVSASGQSGLLAMQTMYSSNGWDSYAWAWVANADEVDIVIHNPGVTEDPACGPLIDSVAIKTLNPPRRTNKNLVKNGDFEEGPYIIPGTKWGVLIPSRVVEDHSPLPGWMVESLKAIKYIDGESFAVPRGRRAVELLAGRESAIAQVIRTVPGRQYVLSFTIGDASNACRGSLMVEAYAGRESTKVAYESAGKGGVKRAVLPFRAASARTRLVFFSSFYSTRSDDLSSLCGPVLDDVVVVSVRTKRG

SEQ ID NO: 57 - DNA, 1116 bp, Arabidopsis lyrata
atgtaccattaccaagaagcagcactcctcgtagccctcctcttcgtttcttcgaatgtcgtcgtatcggccccaatccgcgatggtttattaccaaacggtaacttcgagttgggtcctaaaccctcccaattgaaaggatccgtggttaaggaacgaaccgccgtaccaaactgggacataaccggttttgtggagtacatcaaatccggtcagaaacaagacgacatggtcttggtcgtaccgcagggttcctccgccgttcgcttaggcaacgaagcctcgatctcccagaaaatctccgtcttacccggccgtctgtactcaatcacgttcagcgccgctagaacatgtgctcaagacgagaaactcaatatctccgtgacacacgagtcaggtgtgatccctatccagacaatgtacggcagtgatggttgggactcatacgcatgggcttttaaagctggtggccccgaaatccatatccggttccataacccgggtgttgaagagcacccggcttgtggaccgttgatcgacgccgtggctatcaaggctttgttccctcccagattctctggatacaatctgataaagaatgggaacttcgaagaaggaccttacgtgttccccacggcaaaatcgggagtactgatcccaccgttcatcgaggacgataacagcccattgcccggttggatgatcgagtctctcaaggccgttaagtacgtagacaaagcacacttcgctgtccccgaaggacaccgagccattgagcttgttggaggcaaagagagcgccatttctcagattgtaaggacgtcactgaacaaattctacgccctcacgttcagcgtcggagacgccagagacggttgtgagggaccgatgacagtggaggcgttcgctggacaaggcaaggtcatggtggattacgcgtctaaagggaaaggcgggtttagacgtgggaggcttgtgttcaaggcggtatcggccaggacacgtgtcactttcttgagcacgttttatcatatgaagagtgatcactctggctcgctatgtggtccggtgatcgatgacgtcaggctggtggcggttcggaaactccgaggatga

SEQ ID NO: 58 - protein, 371 aa, Arabidopsis lyrata
MYHYQEAALLVALLFVSSNVVVSAPIRDGLLPNGNFELGPKPSQLKGSVVKERTAVPNWDITGFVEYIKSGQKQDDMVLVVPQGSSAVRLGNEASISQKISVLPGRLYSITFSAARTCAQDEKLNISVTHESGVIPIQTMYGSDGWDSYAWAFKAGGPEIHIRFHNPGVEEHPACGPLIDAVAIKALFPPRFSGYNLIKNGNFEEGPYVFPTAKSGVLIPPFIEDDNSPLPGWMIESLKAVKYVDKAHFAVPEGHRAIELVGGKESAISQIVRTSLNKFYALTFSVGDARDGCEGPMTVEAFAGQGKVMVDYASKGKGGFRRGRLVFKAVSARTRVTFLSTFYHMKSDHSGSLCGPVIDDVRLVAVRKLRG

SEQ ID NO: 59 - DNA, 1080 bp, Arabidopsis lyrata
atgaaaaagattcaatctttgtctctagatctaagatttatctctctgtttacttcttcaggatatcttcgtaatggaaacttcgaagagtcaccaaagaaaaccgacatgaaaaaaacagttctaatcggcaaaaccgccttgcccgaatgggaaatcaccggtttcgtcgagtacatcgccggcggtcctcagccgggaggcatgttttttccggtggctcatggagtccacgccgtgaggctcggaaacgaagccacaatctctcagaagttagaagtgaagccaggttctctctacgcactcacgtttggtgcgtcgagaacttgtgcacaagacgaggttcttagagtctctgtgccttctcagtccggtgacttgccgcttcaaacactttacaacagcttcggaggtgacgtgtacgcttgggccttcgtcgctaagacttctcaagttactgtgactttccataatcctggagttcaagaagatcctgcttgtggtcctttgttggacgctgtcgccattaaagagcttgttcatccaatctacaccaaagggaacttggtgaagaacggagggttcgaagaaggtcctcaccgtcttgtgaactccacacaaggagtcctactcccacctaaacaagaagatctcacatcacctttacctggttggatcatagagtcactcaaggcagtgaaattcatagactctaagtactttaatgtcccctttggacatgctgctatcgagctcgttgcaggcaaagaaagtgccattgcacaagtcattagaacttctccaggtcaaacttacaccctctccttcgtcgttggagatgctaagaatgactgccatggttccatgatggttgaagcttttgcagccaaggataccctcaaagtaccacacacttccgttggtggaggtcattttaagaccgcaagtttcaagttcaaggcggttgaggcaagaactagaattactttcttcagtggtttttaccataccaagaagactgatattggatctctatgtggtcctgtcattgacgagattgtggtttctcatgtcgcttag

SEQ ID NO: 60 - protein, 359 aa, Arabidopsis lyrata
MKKIQSLSLDLRFISLFTSSGYLRNGNFEESPKKTDMKKTVLIGKTALPEWEITGFVEYIAGGPQPGGMFFPVAHGVHAVRLGNEATISQKLEVKPGSLYALTFGASRTCAQDEVLRVSVPSQSGDLPLQTLYNSFGGDVYAWAFVAKTSQVTVTFHNPGVQEDPACGPLLDAVAIKELVHPIYTKGNLVKNGGFEEGPHRLVNSTQGVLLPPKQEDLTSPLPGWIIESLKAVKFIDSKYFNVPFGHAAIELVAGKESAIAQVIRTSPGQTYTLSFVVGDAKNDCHGSMMVEAFAAKDTLKVPHTSVGGGHFKTASFKFKAVEARTRITFFSGFYHTKKTDIGSLCGPVIDEIVVSHVA

SEQ ID NO: 61 - DNA, 1122 bp, Arabidopsis lyrata
atgggccgtttggttattaacggcgacttcgaaacatcaccgtcacatggcttccctgacgacggagtaaccgacgggccatcagatatcccaagctggaaatccaacggtacggtggagctaatcaactccggtcaaaaacaaggcggaatgatcctcattgtcccacaaggtcgtcacgccgtccgattaggcaacgacgcagagatcagccaagatctaacggttgagaaaggttttgtctattcagtgactttcagtgcagctcgcacgtgcgctcagctcgaatcgataaacgtgtcggtggcgtctgtgaacgcagacgcggatgatatggttgcgtcgcgtaacgtggatttgcaaacgttgtatagtgttcaagggtgggatccttacgcgtgggcgtttgaagcggaagatgatcatgtacggttggtttttaaaaacccgggtatggaagatgacccgacttgtggaccaatcatcgatgacattgctattaagaagctctttactcctgataaacccaaagacaatgcggtgattaatggagatttcgaagaaggtccatggatgtttaggaacacgtctcttggtgttttacttccgacaaacctcgacgaagaaacctcgtctcttccaggttggactgttgaatcgaacagggcggttcggtttgttgactcggatcacttctcagttccaggtggaaaacgagccgtcgaactactctcaggcaaagaaggcattatttcacaaatggttgagaccaaagcagataaaccgtacacattaactttctcgctaggacacgcaggtgataaatgcaaggaaccattggctataatggcattcgcaggtgatcaggcgcagaactttcattacatggcgcaagcgaactctagtttcgaaaaggccggtttgaatttcacggctaaggctgatcgaaccagagtcgcgttctacagtgtttattacaatacgaggactgatgatatgagctccttgtgtggacctgtgatcgatgacgttagagtttggttctcagggtcgaagagaatcggagctggatttgggtttgggttttcggtttttgttcttcttgctatcgttttggtttag

SEQ ID NO: 62 - protein, 373 aa, Arabidopsis lyrata
MGRLVINGDFETSPSHGFPDDGVTDGPSDIPSWKSNGTVELINSGQKQGGMILIVPQGRHAVRLGNDAEISQDLTVEKGFVYSVTFSAARTCAQLESINVSVASVNADADDMVASRNVDLQTLYSVQGWDPYAWAFEAEDDHVRLVFKNPGMEDDPTCGPIIDDIAIKKLFTPDKPKDNAVINGDFEEGPWMFRNTSLGVLLPTNLDEETSSLPGWTVESNRAVRFVDSDHFSVPGGKRAVELLSGKEGIISQMVETKADKPYTLTFSLGHAGDKCKEPLAIMAFAGDQAQNFHYMAQANSSFEKAGLNFTAKADRTRVAFYSVYYNTRTDDMSSLCGPVIDDVRVWFSGSKRIGAGFGFGFSVFVLLAIVLV

SEQ ID NO: 63 - DNA, 1203 bp, Arabidopsis lyrata
atggtgctatacaactacagtacttggagattggtttccattttaatacttctacttggtctctccatcgtcgccgccgcagactccgccggcaaaactttaccggtcgaagacggcttggtaattaacggcgactttgagactccaccgtcaaacggcttccctgatgacgcaatcatcgaggactcctccgagataccgagctggcgatccgatggcacggtggagctaatcaaatccggtcaaaagcaaggcgggatgatcttgatcgtgcccgagggtcgtcacgccgtcagattaggaaacgatgcagaaatcagccaagaacttcccgtagagaaaggctctatctactctgtcacgttcagtgccgcccgcacatgtgcacagctcgagtcgctgaatgtgtcagtggcttccaatgaacccatagcatcacagaccattgacttgcaaacggtctacagcgttcaagggtgggatccatatgcatgggcgtttgaagcagtggttgatcgcgtccggttggtttttaggaaccctggcatggaggatgatcctacttgtggacctatcattgacgacatcgccgttaagaagctctttactcctgataaaaccaaaggcaatgcagtgattaatggagattttgaagaaggtccatggatgttcaggaacacgacattaggtgttcttcttccgacaaacctcgacgaagaaatatcgtctcttcccggatggaccgtcgaatcaaaccgagcggtccggtttattgactcagaccatttctcggtccctgagggaaagcgagctttggagcttctatcgggcaaagaaggcataatttctcaaatggttgagacaaaggcgaacattccgtacaagctgtctttctcattgggacacgcaggggacaagtgtaaggaacctttggccgtaatggcttttgccggagatcaagcacagaactttcattatatggcgcaggcgaactctagtttcgaaagatcggagttgaacttcacggcgaaagctgaacgaacgaggatcgccttctacagcatttattacaatacgaggacggacgacatgagttcactgtgtggacctgtgattgatgacgttaaggtttggttctccgggtctagtagaattggatttggttttccagtttttattcttctttcattggttttcatctag

SEQ ID NO: 64 - protein, 400 aa, Arabidopsis lyrata
MVLYNYSTWRLVSILILLLGLSIVAAADSAGKTLPVEDGLVINGDFETPPSNGFPDDAIIEDSSEIPSWRSDGTVELIKSGQKQGGMILIVPEGRHAVRLGNDAEISQELPVEKGSIYSVTFSAARTCAQLESLNVSVASNEPIASQTIDLQTVYSVQGWDPYAWAFEAVVDRVRLVFRNPGMEDDPTCGPIIDDIAVKKLFTPDKTKGNAVINGDFEEGPWMFRNTTLGVLLPTNLDEEISSLPGWTVESNRAVRFIDSDHFSVPEGKRALELLSGKEGIISQMVETKANIPYKLSFSLGHAGDKCKEPLAVMAFAGDQAQNFHYMAQANSSFERSELNFTAKAERTRIAFYSIYYNTRTDDMSSLCGPVIDDVKVWFSGSSRIGFGFPVFILLSLVFI

SEQ ID NO: 65 - DNA, 1224 bp, Arabidopsis thaliana
atggttccgagcaacaatagatgcaaatggagttccattttcttgtttctgctcagtgtctccgttgccgtcttagtcgccgtcgctgacgacaagtctccggcggttgaggatggtttagtgatcaacggcgacttcgaaacatcaccgtcaagtggctttcctgacgacggagtaactgacggaccatccgatatcccaagctggaaatccaacggtacggtggagctaataaattccggtcaaaaacaaggcggaatgatcctcattgtcccacaaggccgtcacgccgtccgattagggaacgacgcagagatcagccaagatctaacggttgagaaaggttttgtctattcagtcacgttcagcgctgctcgcacgtgcgctcaactcgaatcgataaacgtgtcggtagcgtctgtgaacgcagacgcggacgatatgctggcgtcgcggaacgttgatttgcaaacgctttatagcgttcaagggtgggacccttatgcgtgggcgtttgaagcggaagatgatcatgtacggttggtttttaagaatccgggtatggaagatgatccgacttgtggaccaatcatcgatgacattgctattaagaagctctttactcctgataaacccaaagataatgcggtgattaatggagatttcgaagatggtccatggatgtttaggaacacgtctcttggtgttttacttccgacaaacctcgacgaagaaatctcgtctcttcctggttggactgttgaatcgaacagagcggttcggtttgttgactcggatcacttctctgttccaaagggcaaacgagccgtcgagctactctcaggcaaagaaggaattatttcacaaatggttgagaccaaagcagataagccgtacatattgtctttctcactaggccacgcaggtgataaatgcaaggaaccattggctattatggcattcgcaggtgatcaggcgcagaactttcattacatggcgcaagcgaactccagtttcgaaaaggccggtttgaatttcacggctaaggctgatcgaaccagagttgcgttctacagtgtttattacaatacgaggactgatgatatgagctccttgtgtggacctgtgatcgatgacgttagagtgtggttctccgggtcgaagagaatcggagctgggtttgggttttgggtttttgttcttctcgttgtcggtttggtttaa

SEQ ID NO: 66 - protein, 407 aa, Arabidopsis thaliana
MVPSNNRCKWSSIFLFLLSVSVAVLVAVADDKSPAVEDGLVINGDFETSPSSGFPDDGVTDGPSDIPSWKSNGTVELINSGQKQGGMILIVPQGRHAVRLGNDAEISQDLTVEKGFVYSVTFSAARTCAQLESINVSVASVNADADDMLASRNVDLQTLYSVQGWDPYAWAFEAEDDHVRLVFKNPGMEDDPTCGPIIDDIAIKKLFTPDKPKDNAVINGDFEDGPWMFRNTSLGVLLPTNLDEEISSLPGWTVESNRAVRFVDSDHFSVPKGKRAVELLSGKEGIISQMVETKADKPYILSFSLGHAGDKCKEPLAIMAFAGDQAQNFHYMAQANSSFEKAGLNFTAKADRTRVAFYSVYYNTRTDDMSSLCGPVIDDVRVWFSGSKRIGAGFGFWVFVLLVVGLV

SEQ ID NO: 67 - DNA, 1113 bp, Arabidopsis thaliana
atgatgtaccaagaagcagcactcctcttagctctcctcttcatctcttcgaatgtcgtcttatcggccccagtccgcgatggtttattaccaaacggcaacttcgagttgggtcctaaaccctcccaaatgaaaggatccgtggttaaggaacgaaccgccgtaccaaactggaacataatcggctttgtggagttcattaaatccggtcagaaacaagatgacatggtcttggtcgtaccgcagggttcctccgccgttagactaggcaacgaagcctcaatctcccagaaaatatccgtcctacctggccgtctgtactcaataacgttcagcgccgctcgaacctgcgctcaagacgagaggctcaatatatccgtgacgcatgagtcaggtgtgatccctatccagacgatgtacggcagcgatggttgggactcatactcatgggcttttaaagctggtggtcccgaaatcgagatccggttccataaccctggtgttgaagagcacccggcttgcggacctttgatcgacgccgtggctatcaaggctttgttccctcccagattctctggatataatctgataaagaatgggaatttcgaagaaggaccttacgtgtttcccacggcaaaatggggagtactgatcccaccgttcatcgaggacgataacagcccattgcccggttggatgatcgagtctctcaaagccgttaagtacgtagacaaagcacacttcgctgtccccgaaggacaccgagccatcgagcttgttggaggcaaagagagcgccatttctcagatagtgaggacgtcactgaacaaattctacgccctcacgttcaacgtgggagacgccagagacggttgtgagggaccaatgattgtggaagcgttcgctggacagggcaaggtcatggtggactacgcttctaaaggaaaaggcgggtttagacgtgggaggcttgtgttcaaggcagtgtcggccaggacacgtgtcactttcttgagcacgttttaccacatgaaaagcgatcactctggctcgctatgtggtccggtgatcgatgatgttaggctggtagcggttgggaaactccgaggatga

SEQ ID NO: 68 - protein, 370 aa, Arabidopsis thaliana
MMYQEAALLLALLFISSNVVLSAPVRDGLLPNGNFELGPKPSQMKGSVVKERTAVPNWNIIGFVEFIKSGQKQDDMVLVVPQGSSAVRLGNEASISQKISVLPGRLYSITFSAARTCAQDERLNISVTHESGVIPIQTMYGSDGWDSYSWAFKAGGPEIEIRFHNPGVEEHPACGPLIDAVAIKALFPPRFSGYNLIKNGNFEEGPYVFPTAKWGVLIPPFIEDDNSPLPGWMIESLKAVKYVDKAHFAVPEGHRAIELVGGKESAISQIVRTSLNKFYALTFNVGDARDGCEGPMIVEAFAGQGKVMVDYASKGKGGFRRGRLVFKAVSARTRVTFLSTFYHMKSDHSGSLCGPVIDDVRLVAVGKLRG

SEQ ID NO: 69 - DNA, 1098 bp, Arabidopsis thaliana
atggcggttcccaaagccattattctacctatcttgctactcatctgtggtgctgctctcggagctcctgcttctgaaggttatcttcgtaatggaaacttcgaagagtcaccaaagaaaaccgacatgaagaaaacagttctactaggcaaaaacgccttgcccgaatgggaaaccaccggtttcgtcgagtacatcgccggcggtcctcagccaggaggcatgtacttcccagtggctcatggagtccacgccgtgaggctcggaaacgaagctacaatctctcagaagttagaagtgaagccaggttctctctacgcactcacgtttggtgcgtcgagaacttgtgcacaagacgaagttcttagagtctctgtaccttctcagtccggtgacttgccacttcaaacactttacaacagtttcggaggtgacgtgtacgcttgggccttcgtcgccaagacttctcaagttactgtgactttccacaatcctggagttcaagaagatcctgcttgtggtcctttgttggacgctgtcgccattaaagagcttgttcatccaatctacaccagagggaacttggtgaagaatggagggttcgaagaaggtcctcaccgtctagtgaactccacacaaggagtcctactcccacctaaacaagaagatctcacatcacctttacctggttggatcatagagtcactcaaggcagtgaaattcatagactctaagtactttaatgtcccctttggacatgctgcgatcgagctagttgcaggcaaagaaagtgccattgcacaagtcattagaacctctcctggtcaaacttacaccctctccttcgtcgttggagatgctaagaatgactgccatggttccatgatggttgaagcttttgcagccagagatacactcaaagtaccacacacttccgttggtggaggtcatgtcaagaccgcgagtttcaagttcaaggcggttgaggcaagaactagaattactttcttcagtggtttttaccataccaagaagactgatactgtatctttatgtggtcctgtcattgacgagattgtggtttctcatgtcgcttag

SEQ ID NO: 70 - protein, 365 aa, Arabidopsis thaliana
MAVPKAIILPILLLICGAALGAPASEGYLRNGNFEESPKKTDMKKTVLLGKNALPEWETTGFVEYIAGGPQPGGMYFPVAHGVHAVRLGNEATISQKLEVKPGSLYALTFGASRTCAQDEVLRVSVPSQSGDLPLQTLYNSFGGDVYAWAFVAKTSQVTVTFHNPGVQEDPACGPLLDAVAIKELVHPIYTRGNLVKNGGFEEGPHRLVNSTQGVLLPPKQEDLTSPLPGWIIESLKAVKFIDSKYFNVPFGHAAIELVAGKESAIAQVIRTSPGQTYTLSFVVGDAKNDCHGSMMVEAFAARDTLKVPHTSVGGGHVKTASFKFKAVEARTRITFFSGFYHTKKTDTVSLCGPVIDEIVVSHVA

SEQ ID NO: 71 - DNA, 1110 bp, Brassica napus
atgtatcaagaagccgcacttctcttagcgctactctgcgtttcttctaatgtcgcggtgtctgctccaatccgcgacggtttattaccaaacggtaatttcgagataggtccaaaaccgtcccaactgaaaggatccgttgttaaggaacgaaacgccgttgctcactgggacatgaccggcttcgtggagtacatcaaagctggtcagaaacaagacgacatggttttggtcgtaccggaaggctcatcagccgtcaggttaggcaacgaggcctcaatctcccagaaaatatccgtacgatcaggtcgtctatattcgattacgttcagcgccgctcgaacttgcgctcaggacgagcggcttaacatctccgtcacgcatgagtctggtgtcatccctatccagacaatgtacggcagctatggctgggactcgtactcatgggcttttaaagctggtggacctgaaatcgtgatccggatccataacccgggtcatgaagagcacccggcttgtggaccgctgatcgacgctgttgctatcaaggctttgttccctccaagattctccggatataatctcataaagaacgggaacttcgaggaaggaccttacgtgttttccacggcaaagtggggagtactgataccacctttcatcgaggacgacaacagccctttgcctggatggataatcgagtctctcaaggccgttaagtacgtggacaaggcacacttcttcgtccctgagggacacagagccatcgagcttgttggaggcaaagagagtgccgtttctcagatcgtgaggacgtcacctaacaaattctacgccctcactttcaacgttggagacgccagagacgcttgcgaaggacccatggcagtggaggcgttcgctggacgtggcaagaccctggtggagtacgtgtctaaggggaaaggcgggtttaaacggggaaggcttgtgttcaaggcggtgtcggcgaggactcgagtcactttcctcagcacgttttaccatatgaagaatgatcactctggctcgctttgtggtccggtcgtcgacgacgtaaggctggtggcggttaagacactccgaggttaa

SEQ ID NO: 72 - protein, 369 aa, Brassica napus
MYQEAALLLALLCVSSNVAVSAPIRDGLLPNGNFEIGPKPSQLKGSVVKERNAVAHWDMTGFVEYIKAGQKQDDMVLVVPEGSSAVRLGNEASISQKISVRSGRLYSITFSAARTCAQDERLNISVTHESGVIPIQTMYGSYGWDSYSWAFKAGGPEIVIRIHNPGHEEHPACGPLIDAVAIKALFPPRFSGYNLIKNGNFEEGPYVFSTAKWGVLIPPFIEDDNSPLPGWIIESLKAVKYVDKAHFFVPEGHRAIELVGGKESAVSQIVRTSPNKFYALTFNVGDARDACEGPMAVEAFAGRGKTLVEYVSKGKGGFKRGRLVFKAVSARTRVTFLSTFYHMKNDHSGSLCGPVVDDVRLVAVKTLRG

SEQ ID NO: 73 - DNA, 1113 bp, Brassica napus
atgtaccaagaagtcgtacttctcttaactctactatgcgtttcttccagtgttgtcatatcgggcccgatcagtgatggtttattaccaaacggtaatttcgagaagggtccgaagccatcccaactgaaaggatccgttattaagggacgaaccgccgtgcctaactgggaaataaccggtttcgtggagtacattaaagctggtcagaaacaagacgacatggtcctggtcgtaccggaaggctcctccgccgtaagattaggcaacgaggcctccatctcccaaaaaatctcagtccgctcaggccgtctgtactcgattacgttcagcgccgctcgaacatgcgctcaggacgagcggctcaacatctccgtcactcatgagtccggtgtcattcctatccagaccatgtacggcagcgatggttgggactcctactcatgggcttttaaagctggtggatccgaaatagagatcaggatccataatccgggtcgtgaggagcacccggcttgtggaccattgatcgacgccatcggtatcaaggctttgttccctcccaggttctccggaaataatttgataaagaacggaaatttcgaagaaggaccttacgtgttcgccaaggcaaaatggggagtactgataccacctttcatcgaggacgataacagcccgttgcctggttggaagatcgagtctcttaaggccgttaagtacgtggacaaggctcatttcttcgtccctgagggacaccgagccatagagctagttggaggcaaagagagtgccgtttctcagatagtgaggacgtcgtcactcaacaaattctacgccctcggtttcaacgtaggagacgcaagagacgcttgcgagggaccaatggcagtggaggcgttcgctggagggaggaagatcctggtggagtacgcgtctaagggtaaaggcgggtttaaacaagggaggcttgtgttcaaggctgtgtctgcgaggactcgtgtcacttttctcagcacgttttaccatatgaagaatgatcactctggctcgctatgtggtccggttatagatgacgtcaggctagtggcggttaggacacttggaggatga

SEQ ID NO: 74 - protein, 370 aa, Brassica napus
MYQEVVLLLTLLCVSSSVVISGPISDGLLPNGNFEKGPKPSQLKGSVIKGRTAVPNWEITGFVEYIKAGQKQDDMVLVVPEGSSAVRLGNEASISQKISVRSGRLYSITFSAARTCAQDERLNISVTHESGVIPIQTMYGSDGWDSYSWAFKAGGSEIEIRIHNPGREEHPACGPLIDAIGIKALFPPRFSGNNLIKNGNFEEGPYVFAKAKWGVLIPPFIEDDNSPLPGWKIESLKAVKYVDKAHFFVPEGHRAIELVGGKESAVSQIVRTSSLNKFYALGFNVGDARDACEGPMAVEAFAGGRKILVEYASKGKGGFKQGRLVFKAVSARTRVTFLSTFYHMKNDHSGSLCGPVIDDVRLVAVRTLGG

SEQ ID NO: 75 - DNA, 1098 bp, Brassica napus
atggcggtgtctaaagccattgttatacctctcttactagtcttatgtgctgctgctcttggagctcctgcttatgaaggctttcttcgcaatggtaacttcgaggagtcaccaaagaagaccgacatgaaaaaaacagttctactcggcaaaaccgccttgcccgagtgggtaaccaccggtttcgtcgagtacatcgccggcggtcctcagccgggaggaatgtacttccccgtagctcacggcgtccacgccgtgaggctcggtaacgaagccaagatctctcagaagctaaaagtcaagccgggctctctctacgcgctcacgttcggcgcgtcgagaacttgcgcgcaagacgaggtccttcgcgtctctgtgcctcctcagtccggtgacttgccgcttcagacgctgtacaacagcttcggtggtgacgtgtacgcttgggctttcgtggccaagacttctgtggttacggtgactttccataaccctggagttcaagaagatccagcttgtggtcctttgttggacgctgtcgccattaaagagcttgttcatccaatgtacaccaaaggtaacttagtgaagaacggtggattcgaagaaggtcctcaccgtctagtgaactcaacacaaggagtccttctcccacctaaacaagaagatctcacatcacccttacctggatggatcattgagtcactcaaggcagttaagttcatagactccaagtacttcaatgtcccctttggacaagccgccatcgagcttgttgctgggagagaaagtgctattgcacaagtcattagaacttcaccaggtcaaacctacagtctctcctttgccgttggagatgctaaaaacgactgccatggatccatgatggttgaggcttttgcagccagagatacactgaaagtgccgcacacttcggttggtggaggtcactttaagatggcaagtttcaagttcaaggcgattggggcaaggactaggattactttcttcagtggctattaccatagcaagaaaatggatatgggatctctctgtggacctgtcattgatcagattgtggtttctcgtgtcgcttag

SEQ ID NO: 76 - protein, 365 aa, Brassica napus
MAVSKAIVIPLLLVLCAAALGAPAYEGFLRNGNFEESPKKTDMKKTVLLGKTALPEWVTTGFVEYIAGGPQPGGMYFPVAHGVHAVRLGNEAKISQKLKVKPGSLYALTFGASRTCAQDEVLRVSVPPQSGDLPLQTLYNSFGGDVYAWAFVAKTSVVTVTFHNPGVQEDPACGPLLDAVAIKELVHPMYTKGNLVKNGGFEEGPHRLVNSTQGVLLPPKQEDLTSPLPGWIIESLKAVKFIDSKYFNVPFGQAAIELVAGRESAIAQVIRTSPGQTYSLSFAVGDAKNDCHGSMMVEAFAARDTLKVPHTSVGGGHFKMASFKFKAIGARTRITFFSGYYHSKKMDMGSLCGPVIDQIVVSRVA

SEQ ID NO: 77 - DNA, 1176 bp, Capsicum annuum
atggaaatacattggagctcaacaagatgcaaatgggtcacaacctttcttcttctacttgcttgctctgctgctggacaagttgaagatggtccgttagttaacggcaattttgagacacctccgtcaggcggtttctcctccggcgacggattctccgatgggcccaccgaaatcccgagctggaaatcaaacggcaccgtagaggtagtagaatcagggcaaaaacagggtggaatgatcctcatagtaccacaaggtagacacgcagttcgactcgggaacgacgccgaaataagccaagagctcaaagtagaaaaaggctctatttactcaattacattcagcgcggctcgcacgtgcgctcagctagagtcactgaacgtttcggttcctcctgcgtcacagaccattgatcttcagacactgtatcatgtttcgggctgggattcctacgcgtgggcctttcaggctgaggaagatgacgtgcgggtcgtttttacaaatcctggtatggaggatgaccccacttgtgggcccatcattgacgatattgctatcaagaagctttttgtaccagataagtcaaaagataatgcagtagttaatggagactttgaagaaggtccatggatgttcaggaatgcttccctcggcgttttgcttccaaccaacctcgacgaggaaacatcgtcactccctggttggatagttgaatcaaatcgagcagtacgttacatcgatacatatcacttcacagttccagaagggaaaagagctatggaattgctttcaggaaaagaaggcattatatcccagatggttgaaaccaagcccaacaagccatacagattgacatttttgttgggccatgcaggggactcatgcaaggaaccactagcaatcatggcctttgctggtgatcaagcccaaaacattcattacactcctaattccaattcttcatttcagaatgctaacctgaacttcacggccaaggcggacaggacgcgtattgcgttctatagcatctattacaatacaagaagtgatgatatgagctctctttgtggacctgttgtggatgatgtgagggttcaactatcagggtctagcagagtcgaggttttagggtttgggtttatgttttggttgttagtcttagttttggtttaa

SEQ ID NO: 78 - protein, 391 aa, Capsicum annuum
MEIHWSSTRCKWVTTFLLLLACSAAGQVEDGPLVNGNFETPPSGGFSSGDGFSDGPTEIPSWKSNGTVEVVESGQKQGGMILIVPQGRHAVRLGNDAEISQELKVEKGSIYSITFSAARTCAQLESLNVSVPPASQTIDLQTLYHVSGWDSYAWAFQAEEDDVRVVFTNPGMEDDPTCGPIIDDIAIKKLFVPDKSKDNAVVNGDFEEGPWMFRNASLGVLLPTNLDEETSSLPGWIVESNRAVRYIDTYHFTVPEGKRAMELLSGKEGIISQMVETKPNKPYRLTFLLGHAGDSCKEPLAIMAFAGDQAQNIHYTPNSNSSFQNANLNFTAKADRTRIAFYSIYYNTRSDDMSSLCGPVVDDVRVQLSGSSRVEVLGFGFMFWLLVLVLV

SEQ ID NO: 79 - DNA, 1107 bp, Citrus sinensis
atggtagctcattcattgtctattgtgcttgctctcggcttgctcttgctcttatctggtcctgcatttgctgccaagtactttgaagggtacctcccaaatggcgactttgaggaactaccaaaaccaactaacctcaaaaagacagttctagttgggaaacatgcacttcccaaatgggaaatcaatggctttgttgaattcatcgccggtgggccccaacccggtggcatgttctttccagtatctcatggagtccatgccattaggcttggcaatgaggcttcgatctctcaaactataactgtaaaaccaggagccctttacgcactaacatttggtgcatcaagaacttgtgctcaagatgaggtgttgagagtctctgtgcctcctcagtcgggggatctgcctctgcagacattgtatgatattaacggtgacacttatgcttggggatttagagccaaaactaacattgttacagtgacattccacaatcctggtgttcaagaggatcctgcttgtggtccacttatcgatgctgttgctattaaggagctctatccgccaatgccgacaagagataacttggtcaagaatcctggctttgaagagggtccacatcggctagtaaacactactaatggagtccttcttcctccaagacaagaagatctcacatccccactccccggctggatcattgaatcactcaaagctgtcaagttcatagatgcaaagcacttcaatgtgccatatggacatgcggcagttgagcttgttgctggtagagaaagtgccattgctcaaattctaagaactgttcccaacaaagagtacaatctcacattcacaattggagatgcaaagaatggctgccatggatcaatgagggttgaagcatttgccggcaaagatacagtggctgttccatttgaatcaaagggaaaaggtgggttcaagagtgccagtctcaagttcaaagccatcgctgcaaggacaagaatcacattcttcagcacttactaccacaccaagattaatgactttggatctctttgtggccctgtcctcgatgaagttagagtactttctattagattttaa

SEQ ID NO: 80 - protein, 368 aa, Citrus sinensis
MVAHSLSIVLALGLLLLLSGPAFAAKYFEGYLPNGDFEELPKPTNLKKTVLVGKHALPKWEINGFVEFIAGGPQPGGMFFPVSHGVHAIRLGNEASISQTITVKPGALYALTFGASRTCAQDEVLRVSVPPQSGDLPLQTLYDINGDTYAWGFRAKTNIVTVTFHNPGVQEDPACGPLIDAVAIKELYPPMPTRDNLVKNPGFEEGPHRLVNTTNGVLLPPRQEDLTSPLPGWIIESLKAVKFIDAKHFNVPYGHAAVELVAGRESAIAQILRTVPNKEYNLTFTIGDAKNGCHGSMRVEAFAGKDTVAVPFESKGKGGFKSASLKFKAIAARTRITFFSTYYHTKINDFGSLCGPVLDEVRVLSIRF

SEQ ID NO: 81 - DNA, 1107 bp, Fragaria vesca
atggctctgttactagtctcttttacacttgctctctccctcatttccaccagtcctgcctttgctgttgcacctaagccttttgaaggactcttggccaatggaaatttcgaagaaccaccaaaaccaagcagcctcaagaaaacagtactcataggcaaaaatgcactgcccaaatgggaaatcaatggatttgtggagtacatctccggcgggcctcaaccaggcggcatgtactttgctgtagctcatggtgtccatgcagttaggctcggcaatgaggcctcgatctctcagaccataaaggtcaaaccaggatctctatatgccctaacattcggggcatcaagaacttgtgcacaggaagaggttttgagggtatcagtgcctcctcaggcaggagaccttcctttgcagactctatacagcagtaatggaggcgatacttatgcttggggattcaaagccacttctaacacagttaaagtgactttccacaatcctggaattcaagaagaccctgcttgcggtccactcttggatgcaattgctatcaaggagctcttccctgtactgcccaccagagataatctggtcagaaatcctgggtttgaggaggcaccccataggttaatgaactcttcccatggtgtactccttcctccaaaacaactagatgcaacctccccacttcctggctggatcattgagtccctcaaagccgtaaagttcattgatgccaagcactttaatgtcccatttggaaagggtgcggttgagcttgttgctgggagagagagtgccatcgcccaggttcttagaacagttcccaacaagctctacagtctctcattcactatcggtgacgcaaggaacggctgccatggatcaatgatggtcgaagcatttgcaggcaaggataccttgaaagttcctttcaactctcaaggaaaaggcggtttcaagaatgctagtttcaagttcaaagcaacttcattcaggaccagaattacattcttcagttctttctaccacaccaggactgatgactatggtgctctttgtggacccatcctagatgaagttaaggtttctcctattgcctag

SEQ ID NO: 82 - protein, 368 aa, Fragaria vesca
MALLLVSFTLALSLISTSPAFAVAPKPFEGLLANGNFEEPPKPSSLKKTVLIGKNALPKWEINGFVEYISGGPQPGGMYFAVAHGVHAVRLGNEASISQTIKVKPGSLYALTFGASRTCAQEEVLRVSVPPQAGDLPLQTLYSSNGGDTYAWGFKATSNTVKVTFHNPGIQEDPACGPLLDAIAIKELFPVLPTRDNLVRNPGFEEAPHRLMNSSHGVLLPPKQLDATSPLPGWIIESLKAVKFIDAKHFNVPFGKGAVELVAGRESAIAQVLRTVPNKLYSLSFTIGDARNGCHGSMMVEAFAGKDTLKVPFNSQGKGGFKNASFKFKATSFRTRITFFSSFYHTRTDDYGALCGPILDEVKVSPIA

SEQ ID NO: 83 - DNA, 1182 bp, Gossypium hirsutum
atggccgagagctccgcaataaacagatgcctcttcctttttatgcttatcttccctcatttctctactctagctctagctgaagatggattggtggcaaatggtgatttcgaggcacgaccctcgaacggcttcccaagcgaggcaatagcggatgggccgacggagatcccgagctggagaacaaaaggcagagtggagctggtgtcgtctggggaaaaagtgagcggagggatgctcctcatcgtgcccggaggctcgaaagccgttagattgggtaatgacgcagagatcagccaagaagtaacggtggagaaagggtccacgtacgcagttaccttcagtgcggcccgcacgtgcgcgcaacttgagtcattgaatgtgtccgtgccacctgcttcacagtcggtagacctccaaacattgtacaacgtgcaagggtgggacccttactcgatttcattcgaggcagaggtggataaagtgccgttgattttccggaacaccggaatggaagatgacccggaatgtgggcccatcattgatgatattgccattaaaaaacttgttacccctgatcagcccaaagacaatgcagtagttaacagtggctttgaatttggcccttggatgttccaaaatgtatctcttggtgtcttgcttccgaccaaccttgacgaagagacatccccattaccaggatggatggtcgaatcaaccagggcggttcgatacattgattccaaccattatgctgtcccagaaggcaaacgtgccgtggagttggtttccggcaaggaaggcatcatttctcaaatggtggaaaccaaaccagataagctatatagcttgaccttctctttggggcacgctggggacaaatgcaaggaaccactggctgtaatggcgtttgcaggggaccaggcacaaaattttcactacacgcctgactctaactccaccttccaagttgctagtgtgaacttcacagccaaggcggagaggacacgtatcgcgttctacagtgtgtattacaatacaagaaccgatgacatgagctcactatgtggtccggtggtggacgatgttcgggtgtggtattcatgggcaagtagaaatgaggtccaagtgttgttagggattggactttctttttgggcttaccttttcgttttggtttag

SEQ ID NO: 84 - protein, 393 aa, Gossypium hirsutum
MAESSAINRCLFLFMLIFPHFSTLALAEDGLVANGDFEARPSNGFPSEAIADGPTEIPSWRTKGRVELVSSGEKVSGGMLLIVPGGSKAVRLGNDAEISQEVTVEKGSTYAVTFSAARTCAQLESLNVSVPPASQSVDLQTLYNVQGWDPYSISFEAEVDKVPLIFRNTGMEDDPECGPIIDDIAIKKLVTPDQPKDNAVVNSGFEFGPWMFQNVSLGVLLPTNLDEETSPLPGWMVESTRAVRYIDSNHYAVPEGKRAVELVSGKEGIISQMVETKPDKLYSLTFSLGHAGDKCKEPLAVMAFAGDQAQNFHYTPDSNSTFQVASVNFTAKAERTRIAFYSVYYNTRTDDMSSLCGPVVDDVRVWYSWASRNEVQVLLGIGLSFWAYLFVLV

SEQ ID NO: 85 - DNA, 1143 bp, Gossypium hirsutum
atgacaatatctgcttcatttttgcttgcttctaccttgctgctcaccggctgtgttttgggtcctatatctcttgtttcagctaaacatggtgttccatcttatgctcataagaaaatcgcttctaaaccttttgaagggtatcttgaaaatggcaactttgaagaacagcccagcccgactgccttaaagaaaacagtactcaaaggagcacacgcacttcccaaatggactatcacagggctagtcgagtacatctcgggtgggcctcaacctggtgggatgttttaccccgtcgctcatggcgtccatgcggtgaagctcggaaacgaggccaccatttctcaaaccatacctgtaaaaccaggggtactgtatgcgctgacttttggggcgtccaggacttgtgcgcaagacgaggtgttgagagtgtcggtgggtactcagtcaggggaccttcccttgcagaccttgtacagtagtatcggtgatgacgtttatgcttggggtttcattcccaaaaccaagtatgccactgttaaattccataacccaggtgttcaagaggatcccacctgtggtccattgttggatgcggttgctattaaggagcttgtccgtcccagagctaccaaatataatctggtgaagaacaatggctttgaagagggtcctcatcgcctaatcaactccaccaatggtgtcttgctcccccctcggcaagaggatttcacatccccactccccggctggatcattgaatcactaaaagccgtaaaattcatcaatgcaaagcacttcaacgtcccggcgggaccactccgcaatcgaactggtttgccgggaaaaaaagtggccatcgcccaaaatcctcaggaacatcccccaacaaatcataacaacatgacgttcatccatcggggacccttcccaacgggttgcaacggagaaatgatggtggaggctttcgctgccaaacatacagtcaaagttcccttcacatcacgtggaaaaggtgaattcaaggctgcaagcttaatgttcaaagctgatacagccaggacaagagtgacattctacagctcttactaccacacgaggagtgatgacttcggggtctctttgtggtcctgttctggatga

SEQ ID NO: 86 - protein, 380 aa, Gossypium hirsutum
MTISASFLLASTLLLTGCVLGPISLVSAKHGVPSYAHKKIASKPFEGYLENGNFEEQPSPTALKKTVLKGAHALPKWTITGLVEYISGGPQPGGMFYPVAHGVHAVKLGNEATISQTIPVKPGVLYALTFGASRTCAQDEVLRVSVGTQSGDLPLQTLYSSIGDDVYAWGFIPKTKYATVKFHNPGVQEDPTCGPLLDAVAIKELVRPRATKYNLVKNNGFEEGPHRLINSTNGVLLPPRQEDFTSPLPGWIIESLKAVKFINAKHFNVPAGPLRNRTGLPGKKVAIAQNPQEHPPTNHNNMTFIHRGPFPTGCNGEMMVEAFAAKHTVKVPFTSRGKGEFKAASLMFKADTARTRVTFYSSYYHTRSDDFGVSLWSCSG

SEQ ID NO: 87 - DNA, 1173 bp, Glycine max
atggaaagaggcgcattgttagcaacgtgtggtctgctgttgcagcataaaacggagtggttggtgagaatgtcagagacattcatattcacactttctctggttatgctatgtgctgcttcagcttttgcagcagttccacacaggttgccagaagtttacctcaagaatggtaactttgaggagaatccaaaccccaaatacctcaagaaaacgacactgattgggaaatatgctcttccaaaatgggagatcagtggtcatgttgagtatgtctcaggggggccacaacctgggggtatgtacttcccagttagtcatggagtgcatgctgtgaggcttggaaatgaggcctcaatctcacaaaccattaaggtcaaacctggcaagtggtacgctctaattctaggagcctcaaggacttgtgctcaagatgaggttttaaggatctcagtgcctccacaatctggagaggttcctttgcagaccctttatagcctcaatggtgatgttatcgcttggggtttccgtcccacttcttctgttgccaaagtgatactccacaaccctggaattcaagaagaccctgcctgtggtccactcttggatgccgttgctatcgcagaattctgccctccaaagcctacaagagctaatttggttaaaaatccggggtttgaggtgggtccattccctattttcaactctacaaacggtgttctacttcctcccgaacaagaagatcatgtgtctccactccctggttggatgattgaatccctcaaagccgtgaagttcatagatgcaaaacatttcaatgtaccatttggacagggagcagtagaacttattgcaggcagggaaagtgtcattgcccaaattctcagaacagttcccaacaaaatttacaacatgaagttcacaattggagacgccagaaatggttgtcatggatcaatgatgattgaagcgtttgcagcaaaagataccctcaaagttcccttcaaatctgagggaaagggcgaattcaagactgtgagtttcaagttcagagcgattgaaaacagaacaagaatcacattctatagctccttctaccatacaagaattcatgactacggatctctttgtggccctgttattgatcaagttatagtgtatcctgtcgcctga

SEQ ID NO: 88 - protein, 390 aa, Glycine max
MERGALLATCGLLLQHKTEWLVRMSETFIFTLSLVMLCAASAFAAVPHRLPEVYLKNGNFEENPNPKYLKKTTLIGKYALPKWEISGHVEYVSGGPQPGGMYFPVSHGVHAVRLGNEASISQTIKVKPGKWYALILGASRTCAQDEVLRISVPPQSGEVPLQTLYSLNGDVIAWGFRPTSSVAKVILHNPGIQEDPACGPLLDAVAIAEFCPPKPTRANLVKNPGFEVGPFPIFNSTNGVLLPPEQEDHVSPLPGWMIESLKAVKFIDAKHFNVPFGQGAVELIAGRESVIAQILRTVPNKIYNMKFTIGDARNGCHGSMMIEAFAAKDTLKVPFKSEGKGEFKTVSFKFRAIENRTRITFYSSFYHTRIHDYGSLCGPVIDQVIVYPVA

SEQ ID NO: 89 - DNA, 1104 bp, Glycine max
atggcggtgactctaacatcaaccctctttatggctttgctatttgctgcttcagcttttgctgctcttcagcctagagtacctgaagcttaccttcaaaatggaaactttgaggagcagccaaaccccaaaaacctccagaaaacaaagctcatggggaaatattctttgcccaaatgggaagtcaatggtctggttgagtatgtctctgggggtccccaacctggaggcatgttcttcccagtgactcatggaatccatgctgtgaggcttggcaatgaggcctcaatctcccaaaatatcaaggtcaaacccggtcaactgtatgctctaattcttggggcctcaaggacttgtgcacaggatgaagttttgaggatctctgtgcctgcacagactggtgatgttcctttgcagaccctttatagcctcaatggtgatgttattgcttgggggtttaaggccacttctagtgttgtcaaagtgactttccacaaccccggagttcaagaagatccatcttgtggccctcttttggatgccattgctatcagagagttctaccctccaatgcctacaagagttaacttggtaaaaaatcctggctttgaggagggtccattccccattttcaactcaaccaatggtgttttgctcccgcctcaacaacaagatggcttctccccactccctggttggattattgagtcactcaaggctgtgaagttcattgattcaaagcatttcaatgtcccatttgggctgggagcagtggagcttgtggcaggcagggaaagtgccattgcccaaatcatcagaacagttaccaacaaagtctacaacatcacattttcagttggagatgccaaaaatgggtgtcatggatcaatgatggttgaagcatttgccgctaaagataccttcaaagttcccttcaaatctgaagggaagggaacatccaagactgtaagcttcaagttcaaagcaattgcaccaagaaccagactcactttctacagttccttctaccataccagaattgatgactatggttctctttgtggccctgttattgatcaagttatagtgttccctgttgcctaa

SEQ ID NO: 90 - protein, 367 aa, Glycine max
MAVTLTSTLFMALLFAASAFAALQPRVPEAYLQNGNFEEQPNPKNLQKTKLMGKYSLPKWEVNGLVEYVSGGPQPGGMFFPVTHGIHAVRLGNEASISQNIKVKPGQLYALILGASRTCAQDEVLRISVPAQTGDVPLQTLYSLNGDVIAWGFKATSSVVKVTFHNPGVQEDPSCGPLLDAIAIREFYPPMPTRVNLVKNPGFEEGPFPIFNSTNGVLLPPQQQDGFSPLPGWIIESLKAVKFIDSKHFNVPFGLGAVELVAGRESAIAQIIRTVTNKVYNITFSVGDAKNGCHGSMMVEAFAAKDTFKVPFKSEGKGTSKTVSFKFKAIAPRTRLTFYSSFYHTRIDDYGSLCGPVIDQVIVFPVA

SEQ ID NO: 91 - DNA, 1182 bp, Glycine max
atggctcggagctccacaagaatgaaatgggtctccatcttcacacttctattcctctcccactcgcccctcacaaccttcgcagaagatgggctagtggcgaatggagattttgaggttagcccatcaagtgggttccctaacgaggcgattgtggagggccccagcgaggtcccaaactggaagtcaaacggcaacgttgagctagtggaatcggggcaaaaacagggtgggatgatcctcattgtaccgcagggtagacacgcggtgaggctcggcaacgacgctgagatcagccaggagctaccggttgagaagggttccatttactcgctcaccttttgtgcggctcgcacctgcgctcagctggagtccatcaacgtgtcggttgcgcctgcatcgcagacggtagacctgcagacactctataacgtccagggatggaacccttacgcggtttctttcaatgcggatgaggacacttttaggttggtatttaagaatcccggcatggaggatgaccccacttgtggccccattattgacaacattgctattaagaagcttttcactcctgataaacccaaagacaacgcagtgatcaatggggattttgaagagggtccatggatgttcaggaacacttcactgggtgtgttgcttcccacaaatttggatgaagaagcgtcctcactacccggttggatagtcgaatccaaccgtgccgtccgttacattgattctgatcactactctgttccacaaggcaggagagccattgagttgctctcaagaaaggaaggaatcatatctcaaatggttgagaccaaaccagacatgctctacagcttgaccttctcattgggtcatgctgatgataagtgcaaggagcctcttgctgttatggcctttgctggggaccaggctcagaacattcactacactcccaattccaattctaccttccaaactgctaacgtcaatttcactgccaaggctgagaggactagaattgcattctatagcatatactacaacaccagaagtgatgatatgagttctctatgtgggcctgtggtggatgacatcagggtctggttttctggctccaacaggcttcatgggttgggcttaaaaaagcttatgcttataattttaggtctagttttaattctaatgtaa

SEQ ID NO: 92 - protein, 393 aa, Glycine max
MARSSTRMKWVSIFTLLFLSHSPLTTFAEDGLVANGDFEVSPSSGFPNEAIVEGPSEVPNWKSNGNVELVESGQKQGGMILIVPQGRHAVRLGNDAEISQELPVEKGSIYSLTFCAARTCAQLESINVSVAPASQTVDLQTLYNVQGWNPYAVSFNADEDTFRLVFKNPGMEDDPTCGPIIDNIAIKKLFTPDKPKDNAVINGDFEEGPWMFRNTSLGVLLPTNLDEEASSLPGWIVESNRAVRYIDSDHYSVPQGRRAIELLSRKEGIISQMVETKPDMLYSLTFSLGHADDKCKEPLAVMAFAGDQAQNIHYTPNSNSTFQTANVNFTAKAERTRIAFYSIYYNTRSDDMSSLCGPVVDDIRVWFSGSNRLHGLGLKKLMLIILGLVLILM

SEQ ID NO: 93 - DNA, 1182 bp, Glycine max
atggctcggagctccacaagaatgaaatgggtctccatcttcacacttctattcctctcccactcgcccctcacaaccttcgcagaagatgggctagtggcgaatggagattttgaggttagcccatcaagtgggttccctaacgaggcgattgtggagggccccagcgaggtcccaaactggaagtcaaacggcaacgttgagctagtggaatcggggcaaaaacagggtgggatgatcctcattgtaccgcagggtagacacgcggtgaggctcggcaacgacgctgagatcagccaggagctaccggttgagaagggttccatttactcgctcaccttttgtgcggctcgcacctgcgctcagctggagtccatcaacgtgtcggttgcgcctgcatcgcagacggtagacctgcagacactctataacgtccagggatggaacccttacgcggtttctttcaatgcggataaggacacttttaggttggtatttaagaatcccggcatggaggatgaccccacttgtggccccattattgacaacattgctattaagaagcttttcactcctgataaacccaaagacaacgcagtgatcaatggggattttgaagagggtccatggatgttcaggaacacttcactgggtgtgttgcttcccacaaatttggatgaagaaacgtcatcactaccaggttggatagtcgaatccaaccgtgccgtccgttacattgattccgatcactactctgttccacaaggcaggagagccattgagttgctctcaggaaaggaaggaatcatatctcaaatggttgagaccaaaccagacatgctctacagcttgaccttctcattgggtcatgctgatgataagtgcaaggagcctcttgctgttatggcctttgctggggaccaggctcagaacattcactacactcccaattccaattctaccttccaaactgctaacgtcaatttcactgccaaggctgagaggactagaattgccttctacagcatatactacaacaccagaagtgatgatatgagttctctatgtggacctgtggtggatgatgtcagggtctggttttccggctccaacgggcttcatgggttgggcttaggaaggcttgggcttgtaattttgggtttagttttggttctgatgtaa

SEQ ID NO: 94 - protein, 393 aa, Glycine max
MARSSTRMKWVSIFTLLFLSHSPLTTFAEDGLVANGDFEVSPSSGFPNEAIVEGPSEVPNWKSNGNVELVESGQKQGGMILIVPQGRHAVRLGNDAEISQELPVEKGSIYSLTFCAARTCAQLESINVSVAPASQTVDLQTLYNVQGWNPYAVSFNADKDTFRLVFKNPGMEDDPTCGPIIDNIAIKKLFTPDKPKDNAVINGDFEEGPWMFRNTSLGVLLPTNLDEETSSLPGWIVESNRAVRYIDSDHYSVPQGRRAIELLSGKEGIISQMVETKPDMLYSLTFSLGHADDKCKEPLAVMAFAGDQAQNIHYTPNSNSTFQTANVNFTAKAERTRIAFYSIYYNTRSDDMSSLCGPVVDDVRVWFSGSNGLHGLGLGRLGLVILGLVLVLM

SEQ ID NO: 95 - DNA, 1188 bp, Gossypium raimondii
atggatgctgctgagagctggtcgagaaccaaatgggtcttccattttatgcttatattcgctcatttctctcttctatcactagctgaagatggtctggtggccaatggtgatttcgagacgccaccgtccggcggcttcccaagcgaggcaatatccgatggagcccccgagatccccagctggagcacgaacggtacggtgaagcttgtgtccgccggtgaaaaagtgagcggcgggatgctactcatcgtaccccgaggcaggcacgccgtcagattgggcaacgacgcggagatcagtcaggaagtgacggttgagaaaggatcggcttacgcggttacgttcagtgcggcacgcacttgcgcgcagatggagtcactgaacgtgtccgtaccacctgcatcgcaaacggtggacctgcaaacattgtacaacgtgcaagggtgggacccttacacgatttcttttgaggcggaggaggataaaggccggttgatttttaggaatccgggcatggaagatgacccggaatgtggacccatcatcgatgacatagccatcaagaaacttatcacccctgataaacccaaagacaatgcagtagttaacagtggcttcgagttcggtccatggatgttccaaaacgtatctcttggtgtcctccttccaaccaacctcgacgaagagacatcgccattacctggatggatggtcgaatcgaaccgagcggttcgatacattgattccaatcactatgcagtcccagaaggtaaacgtgccgtggagttagtctcgggcaaggaaggcatcatttcacaaatggtcgaaaccacaccaaacaagctatacagcttgaccttttcattgggccacgctagggacaaatgcaaggaaccactagctgtcatggcctttgctggagaccaagcacaaaattttcactacactccggactccaactctaccttccaagtcgctagtgtcaacttcacggccaaagcggagagaacacgaatcgcattctacagcgtgtattacaatacccgaaccgacgacatgagctcattatgcggtccggtggtggatgatgttcgtgtttggttttcggggtcctgtagaactaaggttcaaacattgttagggattggacttgccttttcggcttaccttttggttttggtttag

SEQ ID NO: 96 - protein, 395 aa, Gossypium raimondii
MDAAESWSRTKWVFHFMLIFAHFSLLSLAEDGLVANGDFETPPSGGFPSEAISDGAPEIPSWSTNGTVKLVSAGEKVSGGMLLIVPRGRHAVRLGNDAEISQEVTVEKGSAYAVTFSAARTCAQMESLNVSVPPASQTVDLQTLYNVQGWDPYTISFEAEEDKGRLIFRNPGMEDDPECGPIIDDIAIKKLITPDKPKDNAVVNSGFEFGPWMFQNVSLGVLLPTNLDEETSPLPGWMVESNRAVRYIDSNHYAVPEGKRAVELVSGKEGIISQMVETTPNKLYSLTFSLGHARDKCKEPLAVMAFAGDQAQNFHYTPDSNSTFQVASVNFTAKAERTRIAFYSVYYNTRTDDMSSLCGPVVDDVRVWFSGSCRTKVQTLLGIGLAFSAYLLVLV

SEQ ID NO: 97 - DNA, 1185 bp, Hordeum vulgare
atggagcgagggctcgcattgctggggctggggctggcgctgcttctgctggcgccctctcgccgcctggcctcggccgctccggtggaggacggcctgctcatcaatggtgatttcgagacagcaccgcctggtggtttcgtcaaatcttcttctgtttcggagggcgcagcgatcccaagctggacgatcaatggaacagttgagctcatttccgcaggccagcaccagggtggcatgatccttattgttccacaaggggatcatgccgtacggctagggaatgatgcaggcattgggcaggtggtgcaggttgagaagggctccgagtacgcgatcacattcagtgccgcccggacctgcgcgcagctggagtcactgaatatctccgctgggagcatatcgcagacagtcgacttgcagacactgtacagcatagaaggctgggatgcatatgcactggctttccaagcagtggatgagcaggccaacattgaatttaggaaccctggcatggaggacgacccaacctgcgggcctatccttgacaacgtggccatcaagaagctcttctcccccgacaaagcaaaggagaacatggtggtcaatggagactttgaggaggggccatggatgtttccaaacacaagcttcggcgtcctgctcccgacaaaccttgacgagcagacatcggccttaccagggtggatgatcgaatcgaaccgcgcagtccgcttcatcgactccgaccagtacactgttccccaggggaagcgcgccattgagcttctctccggcaaggagggcatcatctcgcagatggttgagacgacccctcagaaggcgtacatcctgacgttcacgctgggctcggcaggggattcgtgccagccaccaatggccgtcatggcattcgcaggcgaccaggcccagaacttccactactcccctatgggcaatgccacgagtcaggccgtgaacgtcaacttcacagcgcgcgccgagaggtcacgcgttgcgctctacagcgtctactacaacacgagaagcgacgaccacagctcgctgtgtgggccggtgatcgacgacgtccgtgtctggggcttgaatggggctgctgggttgaaggcgagcatcgggattcttattgccatggttagtgtcatcgttctcgtgctgttctga

SEQ ID NO: 98 - protein, 394 aa, Hordeum vulgare
MERGLALLGLGLALLLLAPSRRLASAAPVEDGLLINGDFETAPPGGFVKSSSVSEGAAIPSWTINGTVELISAGQHQGGMILIVPQGDHAVRLGNDAGIGQVVQVEKGSEYAITFSAARTCAQLESLNISAGSISQTVDLQTLYSIEGWDAYALAFQAVDEQANIEFRNPGMEDDPTCGPILDNVAIKKLFSPDKAKENMVVNGDFEEGPWMFPNTSFGVLLPTNLDEQTSALPGWMIESNRAVRFIDSDQYTVPQGKRAIELLSGKEGIISQMVETTPQKAYILTFTLGSAGDSCQPPMAVMAFAGDQAQNFHYSPMGNATSQAVNVNFTARAERSRVALYSVYYNTRSDDHSSLCGPVIDDVRVWGLNGAAGLKASIGILIAMVSVIVLVLF

SEQ ID NO: 99 - DNA, 1095 bp, Ipomoea nil
atggctgccaagatttgttttgcgctctttttctgcttagttttagctgtttctgctctaaatgctcctcttgaaggttttctgccaaatgggaactttgaggagggtccgaaggcgagtgacataaagaaaacagttctccaagggaaacacgcgctgccgagatgggaaacctccggcctagtggagtacatctccggcgggccgcagccgggggggatgttctttccggtggcgcacggcgtccacgccgtgaggctgggaaacgaggcgtcgatatcgcagaacatcccggtgaagaagggggctctttacgcgctgacatttgcggcgtcgagaacgtgcgcgcaggaagaggttttgagggtgtcggttccccccttgtccggagacattcctctgcagacactttacagcagcaatggcggcgatgtggtttcctttgctttcagagccgcttctgaggctgcaatggtgacgttccataaccctgggaagcaagaagatcccacttgtggacctctcattgatgctgttgctattaaggaactcctgcctgtattgcccactagagagaatttggtgaggaacaacgggtttgaggagggtcctcaccggctaaggaacgcttcaaacggcgttctcctccctccaaagcagcaagacatggtatccccgcttccaggctggctaatcgagtcgctcaaggcggtcaagtacatagacgcagcccacttcaacatccccttcgggcgggcagcagtcgagctggtggcagggagggaaagtgcgattgcacagatcatcagaaccgtcccgaataaggtctacaccctagcgttcaccgtgggagacgccaagaacggctgccatggcgacatgatggtcgaggcgtttgcaggcaagagcgccttcaaagttcccttcagatccgtcgggaaaggccactccaaatctgtcagcttcaggttcactgccatttcaatcagaactaggttaactttcttcagctccttttaccatactaggatcaatgactatggaactctctgtggcccggttctcgacgaggttaaggtctcccccgctgtctag

SEQ ID NO: 100 - protein, 364 aa, Ipomoea nil
MAAKICFALFFCLVLAVSALNAPLEGFLPNGNFEEGPKASDIKKTVLQGKHALPRWETSGLVEYISGGPQPGGMFFPVAHGVHAVRLGNEASISQNIPVKKGALYALTFAASRTCAQEEVLRVSVPPLSGDIPLQTLYSSNGGDVVSFAFRAASEAAMVTFHNPGKQEDPTCGPLIDAVAIKELLPVLPTRENLVRNNGFEEGPHRLRNASNGVLLPPKQQDMVSPLPGWLIESLKAVKYIDAAHFNIPFGRAAVELVAGRESAIAQIIRTVPNKVYTLAFTVGDAKNGCHGDMMVEAFAGKSAFKVPFRSVGKGHSKSVSFRFTAISIRTRLTFFSSFYHTRINDYGTLCGPVLDEVKVSPAV

SEQ ID NO: 101 - DNA, 948 bp, Juglans hindsii x regia
atggctcagagctcctcaaaaagcaaatgggtctcgcttttgatgcttctctttgctcgttgggctactgcaatcgtaatagaagatggtcctttgccaaacggtgattttgaaacgccgccatcaaacgggttcccaaacggggcaatagcagaagggcccaccttggtccccagctggagatcgaacggcacggtagagctcgtcgaagcgggccaaaaacagggcgggatgatcctcattataccccagggcagacacgccgtgcggcttggcaatgacgccgagatcagccaggacctgaaggtggagaagggatccatatattccgtcacgttcagcgcggctcgtacctgcgcgcagctagagtcactgaacgtgtccgtgccgccggcgtcgctgacaatagacctgcagacactgtacaacgtgcaagggtgggacccttacgcctacgcgttcgaggctgaggaggatgatgtgagtttggtttttaggaatccgggcatggaggacgaccccacttgtggacccatcattgatgacattgccataaaaaagctcttcagtcccgatagactcaaagacaatgcagttatcaatggaaacttggaagaaggcccatggatgtttaggaacacttcgctcggtgtcttactccccaccaaccttgatgaagaaatatcctcattaccaggttggaatgtggaatccaacagggccatccgctacatagactccgaccacttcactgtcccggaaggcaaacgagccatcgaattgctttcaggcaaggaaggcataatttcccagatggtggaaacaacagcaaacaaaccatacaccttgaccttttccttggggcaagctggggacaaatgcaagcagccacttgccgtcatggccttttgccggagaccaggctcaaaacatccattacacgcctga

SEQ ID NO: 102 - protein, 315 aa, Juglans hindsii x regia
MAQSSSKSKWVSLLMLLFARWATAIVIEDGPLPNGDFETPPSNGFPNGAIAEGPTLVPSWRSNGTVELVEAGQKQGGMILIIPQGRHAVRLGNDAEISQDLKVEKGSIYSVTFSAARTCAQLESLNVSVPPASLTIDLQTLYNVQGWDPYAYAFEAEEDDVSLVFRNPGMEDDPTCGPIIDDIAIKKLFSPDRLKDNAVINGNLEEGPWMFRNTSLGVLLPTNLDEEISSLPGWNVESNRAIRYIDSDHFTVPEGKRAIELLSGKEGIISQMVETTANKPYTLTFSLGQAGDKCKQPLAVMAFCRRPGSKHPLHA

SEQ ID NO: 103 - DNA, 1188 bp, Lotus japonicus
atggctcggagctccacaagaatgaaatgggtggtatccatgttcgtgcctctaatccttctccatttggtccttgcagctccagaagaagatgggctagtaccaaatggagactttgaggcatccccatcaaacgggtttccaagtgaggcaacaataatagagggtcccagtgaagtaccaagctggaaatcaaacggcaccgttgagctagtagagtcagggcaaaagcaaggtggtatgatcctcatcgtaccacaaggtagacacgcaataaggctaggcaacgacgctgagatcagccaggaaataacggtggagaagggctcaatctactcaatcacgttttgtgcggctcgcacgtgcgctcagttggaatccatcaacgtgtccgtgccacctgcatcgcagaccatagacctgcagacactgtataacgtgcaagggtggaacccttatgctgtcgctttcaatgcagatgaggacaatgttaggttggtttttaagaaccctggtatggaggatgaccccacttgtggccccattcttgacaacattgctatcaagaagcttttcactcctgataaacccaaagacaatgcagtaatcaatggtgattttgaagaaggtccatggatgttcaagaatacttcaatgggtgttttgcttcccacaaacttggacgaggaaacttcctcgatgcccggttggatagtcgaatccaaccgagccatccgctacattgattccgatcattatgctgttccacaaggaaagagagcaattgagttgctctcaggaaaagaaggcatcatctcccaaatggttgaaacttcaccagacaagctatacagcttgaccttttcattaggccatgctgatgacaagtgcaaggagcctcttgctgtcatggcctttgctggtgaccaagctcaaaacattcactatactccaaactccaattctaccttccaaactgctaacctcaatttcactgccaaggctgacagaactagaattgctttctacagtgtgtactacaacaccagaagtgatgatatgagctctttgtgtgggcctgtggtagatgatgtgagggtctggttttctatgtccaacaggcttggtgggttgggctttgtaaggcttgggcttggggttttgggtttagtttggcttcttctttaa

SEQ ID NO: 104 - protein, 395 aa, Lotus japonicus
MARSSTRMKWVVSMFVPLILLHLVLAAPEEDGLVPNGDFEASPSNGFPSEATIIEGPSEVPSWKSNGTVELVESGQKQGGMILIVPQGRHAIRLGNDAEISQEITVEKGSIYSITFCAARTCAQLESINVSVPPASQTIDLQTLYNVQGWNPYAVAFNADEDNVRLVFKNPGMEDDPTCGPILDNIAIKKLFTPDKPKDNAVINGDFEEGPWMFKNTSMGVLLPTNLDEETSSMPGWIVESNRAIRYIDSDHYAVPQGKRAIELLSGKEGIISQMVETSPDKLYSLTFSLGHADDKCKEPLAVMAFAGDQAQNIHYTPNSNSTFQTANLNFTAKADRTRIAFYSVYYNTRSDDMSSLCGPVVDDVRVWFSMSNRLGGLGFVRLGLGVLGLVWLLL

SEQ ID NO: 105 - DNA, 1110 bp, Lactuca serriola
atgtcgaaacttatctccatgttgcttgttttaatcttcgtctccacctctgttcttgctgctcgtccccctgcaactccaatggaaggtctcttgccaaatggaaacttcgaagaaccaccaaaagcaaccgacataaagaaaacagtcctgctgggtaaaaccgcattacccaaatgggaaatcagcggtctagttgagtacatccacggcggacctcagccgggtggaatgtactttccggtggcacacggcgtccacgccgtcagactcgggaacgaagctacaatctctcaaaatatagctgtgaaagctggatctttatatgctgtgacgtttggtgcttccaggacatgtgcgcaagaggaggttttgagagtatcggtgccaccgcagtccggtgaccttccgctgcagactctttacagcagcgacggtggcgatgtctacgcttatggatttaaagcgaattcgagctcagtgaggttaaccttccataaccctggtgtacaagaagatcccaaatgtggtcctctcattgacgccgtcgccattaaagagctcctccctcccagacctactcgccttaatatcgtgaaaaatggcggatttgaggaaggacctcaccggttattcaactcctccaatggcgtcctcctccctcctcgacaagaagacataacatctcctctccccggatggatcatcgagtctctaaaagccgttaagttcatcgacaacaaacacttctacgtcccctccggcgttgccgccatcgaactagtcgccggaagagaaagcgccatcgcacaaatcctccgaacaatcccaaacaaactctacagcctatcatttgccattggagacgcgaagaacgggtgccatggagacatgatggttgaagcatttgctgcaaaagacaccctgaaagctccattcaaatcggaaggaaaggggaagtcgaaggtggtgagcatgaagtttaaggcgctgtcggcgagaactagagtgactttttacagctcgtattatcacactagggctgatgattttgggtctctttgtggccctgtaattgatgaagttagggtttttcctgtgagagcttaa

SEQ ID NO: 106 - protein, 369 aa, Lactuca serriola
MSKLISMLLVLIFVSTSVLAARPPATPMEGLLPNGNFEEPPKATDIKKTVLLGKTALPKWEISGLVEYIHGGPQPGGMYFPVAHGVHAVRLGNEATISQNIAVKAGSLYAVTFGASRTCAQEEVLRVSVPPQSGDLPLQTLYSSDGGDVYAYGFKANSSSVRLTFHNPGVQEDPKCGPLIDAVAIKELLPPRPTRLNIVKNGGFEEGPHRLFNSSNGVLLPPRQEDITSPLPGWIIESLKAVKFIDNKHFYVPSGVAAIELVAGRESAIAQILRTIPNKLYSLSFAIGDAKNGCHGDMMVEAFAAKDTLKAPFKSEGKGKSKVVSMKFKALSARTRVTFYSSYYHTRADDFGSLCGPVIDEVRVFPVRA

SEQ ID NO: 107 - DNA, 1083 bp, Malus x domestica
atgggtcggagctccacattacacaaatgggtcttaccgacgctgcttcttctcggtcatttggctgctgaaatttcagcagatgacgggccggtgccaaacggagattttgaactgaccccatcaggcggcttttcaaacgacggtgctgtggacgggcccgccgggatccccagctggaaagcaaacggcaccgtcgagcttgtcgaatccgggcagaaacagggtgggatgatcctcatcgtaccgcaaggtagacacgcggtgaggctcggaaacgacgccgaaataagccagcaagtgaaggtggagaaagggtcgatatactcggtgactttcagcgcggcccgcacgtgcgcacagctggagtcgctgaacgtgtccgtgccacctgcgtcgcagacgatagaccttcagaccttgtacaacgtgcaggggtgggacccctacgcgtgggccttcgaggcggaggaggatgatgcgatgttggtcttcaggaatcccggcatggaggatgaccccacttgtgggcccatcattgatgacgttgctatgaagaaactctttacccctgataggcccaaagacaacgcagtgatcaatggtgattttgaggaaggtccatggatgtttccaaacatctcactcggagtcctgctcccaaccaacctcgacgaagaaacttcttccttacccggttggatcgtcgagtccaaccgggctgttaggtacatagactcgtaccattacgcagtgccacaaggcaaacgggccattgaattggtatctggaaaagaaggcatcatatctcaaatggttgaaacttcaccaaacaagccctacaccttgaccttctcattaggccatgctaatgacaaatgcaagcagcctctcggcatcatggcattcgccggagaccaggcgcaaaacgtccattacacaccgaattccaacagcacgttccaaaccgccggcgtgaatttcacggccaaggctgagaggacaaggattgcattctacagtgtgtattacaacaccaggactgatgacatgagctcactctgtgggccctgtggtggatga

SEQ ID NO: 108 - protein, 360 aa, Malus x domestica
MGRSSTLHKWVLPTLLLLGHLAAEISADDGPVPNGDFELTPSGGFSNDGAVDGPAGIPSWKANGTVELVESGQKQGGMILIVPQGRHAVRLGNDAEISQQVKVEKGSIYSVTFSAARTCAQLESLNVSVPPASQTIDLQTLYNVQGWDPYAWAFEAEEDDAMLVFRNPGMEDDPTCGPIIDDVAMKKLFTPDRPKDNAVINGDFEEGPWMFPNISLGVLLPTNLDEETSSLPGWIVESNRAVRYIDSYHYAVPQGKRAIELVSGKEGIISQMVETSPNKPYTLTFSLGHANDKCKQPLGIMAFAGDQAQNVHYTPNSNSTFQTAGVNFTAKAERTRIAFYSVYYNTRTDDMSSLCGPCGG

SEQ ID NO: 109 - DNA, 1104 bp, Medicago truncatula
atggcagtgacattcatatgtacacttttcatgactttgctctttgctgcttcagcatttgctaaggttcaccctaggtcgccagaagttttcttccgaaatgggaactttgagcagcaaccgaacccgggttacataaagcaaacaagactcatggggaaacatgcacttcccaattgggaaaccaatggtctagttgagtatatcactggtgggccacaacctggaggcatgttcttcccagtgtcacatggtgttcatgctgttaggcttggaaatgaagcatccatttcacaaaccatcaaagtcaaacctggtacatggtatgctataatcttaggagccacaagaacttgtgctcaagatgaagttttgagaatctcagtgcctctacaatctggtgatgttcctttgcaaacactttatagcctcaatggtgatgttattgcttggggattcaaggctagatcttcttttgctaaagttaccttccataaccctggtatgcaagaagaccctacttgtggtccacttttggatgctgttgctattagagagttctaccctccgatgccgacaagagctaatttagtaagaaaccctggctttgaggagggtccattcccaattttcaactcaaccaatggtgtcatacttcctccaaaacaacaagatcttgtgtctccactccctggttggattattgaatccctcaaagccattaaattcattgattcaaaccatttccaagtgccatttggaaaaggagcagtggagcttgttgcaggtagggaaagtgccattgcacaaattctaagaacagttacaaacaaagtctacaacttgaaattcacagttggagatggaagaaatggttgtcatggatcaatgatggttgaagcttttgctgcaagagagactcttaaagttccttttaaatctgttggaaagggaatattcaaaacagcaaatttcaacttcaaagcagtttcaaatagaacaagaatcacattctacagctctttctatcatacaaaaattgatgattatggaagtatgtgtggccctgtccttgatcaagttatagtatccccagttgcttaa

SEQ ID NO: 110 - protein, 367 aa, Medicago truncatula
MAVTFICTLFMTLLFAASAFAKVHPRSPEVFFRNGNFEQQPNPGYIKQTRLMGKHALPNWETNGLVEYITGGPQPGGMFFPVSHGVHAVRLGNEASISQTIKVKPGTWYAIILGATRTCAQDEVLRISVPLQSGDVPLQTLYSLNGDVIAWGFKARSSFAKVTFHNPGMQEDPTCGPLLDAVAIREFYPPMPTRANLVRNPGFEEGPFPIFNSTNGVILPPKQQDLVSPLPGWIIESLKAIKFIDSNHFQVPFGKGAVELVAGRESAIAQILRTVTNKVYNLKFTVGDGRNGCHGSMMVEAFAARETLKVPFKSVGKGIFKTANFNFKAVSNRTRITFYSSFYHTKIDDYGSMCGPVLDQVIVSPVA

SEQ ID NO: 111 - DNA, 1104 bp, Nicotiana benthamiana
atggtggtgaaggtttcaatcttccttcttttcttatttctcttcactgtctctgccgttcgcccagctcctcctcttgaaggactactttcaaatgggaatttcgaagagcaaccaaagccaaaagacctcaagaaaaaaacagtacttgtaggcaaatatgctttgcccaaatgggaaatcaacggtttggtagagtacatctctggcgggccacagcctggcgggatgtacttcccagtcgcccacggcgtccatgccgtgaggctagggaatgatgcctcaatttctcaaacaattccagtaaagaaaggctctttgtatgcactcacatttggggcatcaagaacctgtgctcaagatgaggtcttgagggtgtcggtacctcctcaaaccggggaccttccattgcagaccctttatagcagcaatggcggtgatacctatgcttggggtttctatgctacttctaatgtagttaaagttacctttcataatcctggagttcaagaggatccagcttgtggtccactcttggatgctgttgctatcaaagaactcttccctcctcagcccaccagagttaatttggttaaaaatcctggttttgaagaaggacctcacctcttgataaactcttcgcacggagttcttctccctcccaaacaagaagatttgacatccccacttccaggctggatcattgagtcactcaaagcagtgaaattcttggattcagctcatttcaatgtcccgtttggccgagctgcagttgaactacttgcagggagagaaagtgccattgcccaaatcattaggacagtccctaagaaggtgtatgcctttgcattcactgttggcgatgcaaagaacggttgccatggcgatatgatgattgaagcattcgctgctaaagaaacattcaaagttcccttcaagtcacaaggaaaaggcagctttaagactgttagtttcaagttcacagctattgcagacaggacaagaattactttctacagctcttattaccatacaaagatcaatgactatggatctctttgtggtcctgttgtggatgaagttaaggtgacccctgttgcttag

SEQ ID NO: 112 - protein, 367 aa, Nicotiana benthamiana
MVVKVSIFLLFLFLFTVSAVRPAPPLEGLLSNGNFEEQPKPKDLKKKTVLVGKYALPKWEINGLVEYISGGPQPGGMYFPVAHGVHAVRLGNDASISQTIPVKKGSLYALTFGASRTCAQDEVLRVSVPPQTGDLPLQTLYSSNGGDTYAWGFYATSNVVKVTFHNPGVQEDPACGPLLDAVAIKELFPPQPTRVNLVKNPGFEEGPHLLINSSHGVLLPPKQEDLTSPLPGWIIESLKAVKFLDSAHFNVPFGRAAVELLAGRESAIAQIIRTVPKKVYAFAFTVGDAKNGCHGDMMIEAFAAKETFKVPFKSQGKGSFKTVSFKFTAIADRTRITFYSSYYHTKINDYGSLCGPVVDEVKVTPVA

SEQ ID NO: 113 - DNA, 1101 bp, Nicotiana tabacum
atggtggtgaaggtttcaatcttgcttcttctctccttgctctccactgtctctgccgttcgcccagctcctcttgaaggactacttccaaatgggaatttcgaagagcaaccaaagccaaaagacctcaagaaaaaaacagtactcgtaggcaaatatgctttgcccaaatgggaaatcaatggcttggtagagtacatttctggcgggccacagcccggcgggatgtacttcccagtcgcccacggcatccatgccgtgaggctagggaatgatgcctcaatttctcaaacaattccagtaaagaaaggctctttgtatgcactcacatttggggcatcaagaacctgtgctcaagatgaggtattgagggtgtcggtacctcctcaaaccggggaccttccattgcagaccctttatagcagcaatggcggtgatacctatgcttggggtttctatgctacttctaatgtagttaaagtttcctttcataatcctggagttcaagaggatccagcttgtggtccactcttggatgctgttgctataaaagaactcttccctcctcggcccaccagagtgaatttggtaaaaaatcctggttttgaagaaggacctcacctcttaataaactcttcgcacggagtccttctccctcccaaacaggaagatttgacatccccacttccaggctggatcattgagtcactcaaagcagtgaaattcttggattcagctcatttcaatgtcccgtttggccaagctgcagttgaactacttgcagggagagaaagtgccattgcccaaatcattaggacagtccctaagaaggtgtatgcctttgcattcactgttggtgatgcaaagaacggttgccatggcgatatgatggttgaagcattcgctgctaaagaaacattcaaagttcccttcaagtcacaaggaaaaggcagctttaagactgttagtttcaagttcacagctatcgcagacaggacaagaattactttctacagctcttattaccatacaaagatcaatgactatggatctctttgtggtcctgttgtggatgaagttaaggtgacccctgttgcttag

SEQ ID NO: 114 - protein, 366 aa, Nicotiana tabacum
MVVKVSILLLLSLLSTVSAVRPAPLEGLLPNGNFEEQPKPKDLKKKTVLVGKYALPKWEINGLVEYISGGPQPGGMYFPVAHGIHAVRLGNDASISQTIPVKKGSLYALTFGASRTCAQDEVLRVSVPPQTGDLPLQTLYSSNGGDTYAWGFYATSNVVKVSFHNPGVQEDPACGPLLDAVAIKELFPPRPTRVNLVKNPGFEEGPHLLINSSHGVLLPPKQEDLTSPLPGWIIESLKAVKFLDSAHFNVPFGQAAVELLAGRESAIAQIIRTVPKKVYAFAFTVGDAKNGCHGDMMVEAFAAKETFKVPFKSQGKGSFKTVSFKFTAIADRTRITFYSSYYHTKINDYGSLCGPVVDEVKVTPVA

SEQ ID NO: 115 - DNA, 1200 bp, Oryza sativa
atggagggagattcggcgaggaggctcgcattgctggggctgtgcctgggcctgcttctgctggcgccctcccatctggcctcggccgctgcggtggaggatggcttgctcagcaatggtgactttgagacagcaccagctggtggttttgtcaaatctgcttcagttgctgaaggtgcatcatcgatccctggctggacgatcaatgggacagtcgagctcatctcagcaggccagcaccagggtggcatgattcttattgttccacagggggatcatgctgtacgtcttggaaacgacgcaagtatagggcaggtggtgcaggttgagaagggctcagagtatgctatcacgttcagtgctgcccgaacgtgtgcacagctagagtcactcaatgtgtctgtgctcggtggtgcatcacagacagtggacctgcagacattgtacaacatagaaggctgggatgcatatgcattggcttttcaggcaacagatgagcaggcgagccttgagttcaggaaccctggtatggaggatgatccgacttgtggacctatccttgacaacgttgccataaagaagctcttcactccagacaaaccaaaggatactgtggtgtcaaatggagactttgaggagggtccatggatgtttccaaacacgagctttggggtgcttctcccaaccaacctcgatgagcagacgtctgccttgcctggctggatgattgagtcaaaccgagctgtccgctttgtcgactctgaccaatacaccgttccccaagggaagcgcgccattgagcttctatcagggaaggaaggcatcatctcacagatggtcgagacaacccctcagaaagagtacagcctgacattcacattgggctcagcaggggattcatgccagccaccaatggctgtcatggcattcgcaggtgaccaggcccagaacttccactactcgcccatgggtaatgccacaagccaggctgcgaatgtgacattcacagcacgagctgagaggacgcgggtagcgttctacagtgtgtattacaacacgagaagcgacgaccacagctcgctctgtgggccagtgatcgatgatgtgcgcgtctggggcttgaatggagctgctgggttgaaggcaagtattgggctgctgcttggcattgttagcattgtcagtctgatgttgttctga

SEQ ID NO: 116 - protein, 399 aa, Oryza sativa
MEGDSARRLALLGLCLGLLLLAPSHLASAAAVEDGLLSNGDFETAPAGGFVKSASVAEGASSIPGWTINGTVELISAGQHQGGMILIVPQGDHAVRLGNDASIGQVVQVEKGSEYAITFSAARTCAQLESLNVSVLGGASQTVDLQTLYNIEGWDAYALAFQATDEQASLEFRNPGMEDDPTCGPILDNVAIKKLFTPDKPKDTVVSNGDFEEGPWMFPNTSFGVLLPTNLDEQTSALPGWMIESNRAVRFVDSDQYTVPQGKRAIELLSGKEGIISQMVETTPQKEYSLTFTLGSAGDSCQPPMAVMAFAGDQAQNFHYSPMGNATSQAANVTFTARAERTRVAFYSVYYNTRSDDHSSLCGPVIDDVRVWGLNGAAGLKASIGLLLGIVSIVSLMLF

SEQ ID NO: 117 - DNA, 1182 bp, Oryza sativa
atggagcttcctcggggtgccctgctgctggtgctgctcgccgtcgccgccgccgcctcctccgccggtgccacactcgccgtcaaagctccagttccagttccagttccagctcctgcccctgcccatgcacctcctcaacctaaagatgctgaaggcctcctcatcaatggcaacttcgagacggcgccgaggaaggtgaacaagacactcatcgtcggccgccactcgctgccggggtggacgctgcgggggcacgtcgagtacgtctccggcgggccgcagcccggcggcatgttcttcgcggtgccgcacggcgtgcacgctctccgcctgggcggccgcgcgtcggcgtcccagaacgtgtccgtgcgccccggcgcgctctacgcgctcaccttcgccgccacgcgcacgtgcgcccaggacgaggcgctccgcgtcgccgtcgcgccgtcgctctcgccgcccgccgacgtcgccgtccgcacgctctacagcgccgacaccgccgacacctgggcgtggggcttccgcgcctcctccgccgccgcgcaggtcaccttctccaaccccggcgtccaggaggacgcgtcgtgcggccccctgctcgacgccgtcgccatcaaggagctcccaacgccatacccaaccaaagacaacctgatcaagaacgagggattcgagatcgggccgcaggtgttcaagaactcgacggtgggcgtcctccttccgccgaagcagaaggacgcgacgtcgccgctcccgggctggatcatcgagtcgctcaaggccgtccgcttcatcgacgcggcgcacttctccgtcccggcggggcagtacgccgtggagctcgtcgccggcagggagagcgccatcgcgcaggtgatccgcacggtggcgaaccgcgcctacaacctatcgttcgtcgtcggcgacgccaagaacggctgccacgggtcgatgctggtggaggcgttcgccgggaacgtgacgcagaaggtgccgttcgagtccgtcggaaacggcgggttcaagccggcgagcttccggttcgtcgccgccggcgtgcgcaccagggtgaccttctacagctcgtactaccacaccaaggtgagcgacggcgtctcgctgtgcggccccgtgctggatcaggtcaaggtccagccattgaaggcgtga

SEQ ID NO: 118 - protein, 393 aa, Oryza sativa
MELPRGALLLVLLAVAAAASSAGATLAVKAPVPVPVPAPAPAHAPPQPKDAEGLLINGNFETAPRKVNKTLIVGRHSLPGWTLRGHVEYVSGGPQPGGMFFAVPHGVHALRLGGRASASQNVSVRPGALYALTFAATRTCAQDEALRVAVAPSLSPPADVAVRTLYSADTADTWAWGFRASSAAAQVTFSNPGVQEDASCGPLLDAVAIKELPTPYPTKDNLIKNEGFEIGPQVFKNSTVGVLLPPKQKDATSPLPGWIIESLKAVRFIDAAHFSVPAGQYAVELVAGRESAIAQVIRTVANRAYNLSFVVGDAKNGCHGSMLVEAFAGNVTQKVPFESVGNGGFKPASFRFVAAGVRTRVTFYSSYYHTKVSDGVSLCGPVLDQVKVQPLKA

SEQ ID NO: 119 - DNA, 1227 bp, Picea sitchensis
atggcgaaaaaatcggagcttccattctcgtcggttttccgtcttctgcaagtattaatatgcttaagcattctctcgaccttcgttacggcacaagatggcgttacggcagaagacggtctgctggtgaatggaaactttgaaaaggaggggatcgagaatagaacatcacgggcaggcgatatagattctttgcccgggtggaatattgatggcatggtggaatacataaatgaggggcagaagcagggcagcatgtacctggtcgttcctgaaggaaaacatgccgtgaggctgggcaacgaggctcagatcagccaacagataaatattcagaaaggatccacatattctctcacattcagcgcggctcgaacctgcgcgcagctggaatcgcttaacgtctctgtgcctccgtcgactaggaacgtagatttgcagactttgtacagtatttatggctgggatacctatgcctgggcttttcaggcccaatctgaaaatgtggaagttattttccaaaatcctggaatggaagaagatcctacttgcggtccgattcttgacgccattgccttgaaacagatttctactcctgataagctccgagacaatgctgtgattaatggagatttcgaagaggggccgtggatgtttgcaaatgagacactgggagttcttttgccgacgaatttggacgtggcaacatcttctttgccgggatggattatggagtcgagcaaggcggtgagatatatcgactcgaatcactacaaagttcccgaggggaagagagccatcgagcttctttccggcaaagaaggtattatttcgcagatggtggagacagatcccggcaataaatatacgatgagttttctcttgggacaggccggcgatggctgccaggaacctatggcggtcatggcttttgccggagatcaagcggatagtttccacttcaacaatcctccggcaaacggcatctatgagcctaataatgtgaccttcacagctaaggctgcacggacccgcattgcattttacagcttgtactataatacaagggttcgggataggagttctctgtgtggccctgtgattgatctagtaaaagtggttgatctgtcgaagtctggcacagttgcaggcttttcaggattctctgtttccctgctacttttggtgagcgtgttaacgatggcgttcacactgggtagtctgtaa

SEQ ID NO: 120 - protein, 408 aa, Picea sitchensis
MAKKSELPFSSVFRLLQVLICLSILSTFVTAQDGVTAEDGLLVNGNFEKEGIENRTSRAGDIDSLPGWNIDGMVEYINEGQKQGSMYLVVPEGKHAVRLGNEAQISQQINIQKGSTYSLTFSAARTCAQLESLNVSVPPSTRNVDLQTLYSIYGWDTYAWAFQAQSENVEVIFQNPGMEEDPTCGPILDAIALKQISTPDKLRDNAVINGDFEEGPWMFANETLGVLLPTNLDVATSSLPGWIMESSKAVRYIDSNHYKVPEGKRAIELLSGKEGIISQMVETDPGNKYTMSFLLGQAGDGCQEPMAVMAFAGDQADSFHFNNPPANGIYEPNNVTFTAKAARTRIAFYSLYYNTRVRDRSSLCGPVIDLVKVVDLSKSGTVAGFSGFSVSLLLLVSVLTMAFTLGSL

SEQ ID NO: 121 - DNA, 1107 bp, Picea sitchensis
atgtggagctccggggtttcgatctgccgttttctatgtctgctgcagtttctttttcagctatgggtctctgtcacggccagtgatggtctgcttccaaatggggactttgagttggctcccaagcccaaggacctgaaaggcacggtccttctagggcgaaactccttaccacaatggcgaaccaaaggttttgtggagtacataacctctggacatcatcagcgtgatatgttagtggtcgtccccgaaggagcccacgctgtgagactgggaaacgaggcgtccatcagccagagtatcaaggtcaccaggggttcgtattactcgcttacatttagtgcagcgaggacttgtgcacagtctgagagattgaacgtctctgtgcctccgttttctggagacatatccatacagaccctttacagcagcaatggctgggatgcttactcttgggcattcagggctccttccagtgtagtcgatgtaattcttcacaaccccggcgttgaagaagatccggcttgcggaccggtgctggacgcagtagccatcaaggagttgtttccccctaggttcacaaaattcaatctgataaagaatggagattttgaggaagggccttacatgttcgcaagctccaactcaggcgtgcttctccctcccaatgttgaagatgccatctctcctctgccgggatggatcatcgaatccctgaaagctgtcaagtaccttgacggagcgcattttgcagttccgcagggcaggagggccgtggagctcgtggccggcaaagaaagtgccatatcccagatcgtccgaacggttcctggcagattctaccgcttgagcttcgctgtaggagatgccaggaatacctgtttgggtaacatgattgtggaggcttttgctgggagggaaacggtaaaggttcccttcgaatcgaagggagccggtaccttcaaggctgcaacgctcgcgtttactgcgattgctcccaggactcgcgttacattcttcagcacgttttacaccatgagaagtgacgacttcagtacgctgtgcggtccagtgatagatcaagttaaactcttttctcttcgttaa

SEQ ID NO: 122 - protein, 368 aa, Picea sitchensis
MWSSGVSICRFLCLLQFLFQLWVSVTASDGLLPNGDFELAPKPKDLKGTVLLGRNSLPQWRTKGFVEYITSGHHQRDMLVVVPEGAHAVRLGNEASISQSIKVTRGSYYSLTFSAARTCAQSERLNVSVPPFSGDISIQTLYSSNGWDAYSWAFRAPSSVVDVILHNPGVEEDPACGPVLDAVAIKELFPPRFTKFNLIKNGDFEEGPYMFASSNSGVLLPPNVEDAISPLPGWIIESLKAVKYLDGAHFAVPQGRRAVELVAGKESAISQIVRTVPGRFYRLSFAVGDARNTCLGNMIVEAFAGRETVKVPFESKGAGTFKAATLAFTAIAPRTRVTFFSTFYTMRSDDFSTLCGPVIDQVKLFSLR

SEQ ID NO: 123 - DNA, 1107 bp, Pinus taeda
atgtggtgctccagggtttcgatctgccgtttcttatgtctgctgcagttgctttttcagctatggggatctgtcaccgccagtgatggtctgctgccgaatggggactttgagttggctcctaagcccaagaacctgaaaggcacggtccttgtagggcgaaactccttaccgaagtggcgaaccagaggttttgtggagtacataacatctggacatcgtcagcgtgatatgttggtggtcgtcccggaaggagcccacgctgtgagactgggaaacgaggcctccatcagccagagtatcaaggtcacaaggggctcctattactcgcttacatttagtgcggcgaggacttgtgcacagtttgagagattgaatgtctctgttcctccgttttctggagacatatccatacaaaccctgtacagcagcaatggctgggatgcttattcctgggcattcagggctctttccagtgtagtcgatgttattcttcataaccccggcgttacagaagatccggcttgcggaccagtgctggatgcagtggcaatcaaggagttgttcccccctcgattcacaagattcgatctgataaagaatggcgattttgaggagggcccttacatgttcccaagctccaactccggcgtgcttctccctcccaacgttgaagatgccatttctcctctgccgggatggatcatcgaatctctgaaagctgtcaagtaccttgacggggcacattttgcagttccgcagggcaggagggccgtggagcttgtggccggcaaggaaagcgccatatcccagctcgtcagaacgattcccggcagattgtaccgcttgagctttgcagtgggagatgccaggaatacctgcatgggtaacatgattgtggaggcatttgctggaagggaaacagtcaaggttcccttcgaatcaaagggagccggaacctttaaggctgcaacactcgctttcactgcgatcgcccccaggactcgcgttactttcttcagtacgttttacaccatgagaagcgacgacttcagtacgctttgcggtcctgtgatagatcaagttaaactcttttccgttcgttaa

SEQ ID NO: 124 - protein, 368 aa, Pinus taeda
MWCSRVSICRFLCLLQLLFQLWGSVTASDGLLPNGDFELAPKPKNLKGTVLVGRNSLPKWRTRGFVEYITSGHRQRDMLVVVPEGAHAVRLGNEASISQSIKVTRGSYYSLTFSAARTCAQFERLNVSVPPFSGDISIQTLYSSNGWDAYSWAFRALSSVVDVILHNPGVTEDPACGPVLDAVAIKELFPPRFTRFDLIKNGDFEEGPYMFPSSNSGVLLPPNVEDAISPLPGWIIESLKAVKYLDGAHFAVPQGRRAVELVAGKESAISQLVRTIPGRLYRLSFAVGDARNTCMGNMIVEAFAGRETVKVPFESKGAGTFKAATLAFTAIAPRTRVTFFSTFYTMRSDDFSTLCGPVIDQVKLFSVR

SEQ ID NO: 125 - DNA, 1209 bp, Pinus taeda
atggctaaaacttctgagctctcattgctactgttttttcgttttcttgaaacattagtgtgcttaagtgttctttcgaccttcgttgcagcagaagatggtctgctggtgaatggaaactttgaaaaggcggggatcgagaatagaacatcacgggcaggcgtgatggattcgttgccggggtggactatagagggcacggtggaatatgtaaatgacggggagaggcagggcagcatgtacctggttgttcctgaaggtaagcatgccgtgaggctgggcaacgacgcccagatcagccaacagataagtcttcagaaaggatcgacatattctctcacatttagcgcggcgcgaacctgtgcgcagatggaatcgctcaacgtttctgtgcctccgtctactaggaacgtagatttgcagactctgtataatatttatggctgggatgcctatgcctgggcttttcaggcccaagctgacaatgtcgaggttattttccacaatccgggcttggaagaagatccaacttgcggtcccattcttgacgccatcgccttgaaacagatttctactcctgaaaagctccgagacaatgctgtgattaatggagatttcgaagaggggccgtggatgtttgcgaatgagaccttgggggttcttttgccgacaaacctggacgtggcaacatcatctctaccgggatggatcatagagtcgagcaaggcggtgcgatatatcgactcgaatcactacaaagttcccgagggtaagagagccatcgagcttctttcgggcaaagaaggtattatttcgcaaatggtggagacagaacccggcaagaaatatacgatgagttttctcatgggacaggccggcgatggctgccaggaacctatggcggtcatggcttttgccggagatcagtcgggtaatgtccactacaataatcctccgccaaacggcatctatgagcctaataatgtgacctttacggcaaaggccgaacggacccgcattgctttctacagcttgtattataatacgagggttgcagataggagttctctgtgtggccccgtgattgattcagtaaaggtcgttgatctgtccaagtctgctgctgttgcaggcttttctggattctctgtttccctgctacttctcgtgaacgcattgacgatagcattcacactgggcagtctgtaa

SEQ ID NO: 126 - protein, 402 aa, Pinus taeda
MAKTSELSLLLFFRFLETLVCLSVLSTFVAAEDGLLVNGNFEKAGIENRTSRAGVMDSLPGWTIEGTVEYVNDGERQGSMYLVVPEGKHAVRLGNDAQISQQISLQKGSTYSLTFSAARTCAQMESLNVSVPPSTRNVDLQTLYNIYGWDAYAWAFQAQADNVEVIFHNPGLEEDPTCGPILDAIALKQISTPEKLRDNAVINGDFEEGPWMFANETLGVLLPTNLDVATSSLPGWIIESSKAVRYIDSNHYKVPEGKRAIELLSGKEGIISQMVETEPGKKYTMSFLMGQAGDGCQEPMAVMAFAGDQSGNVHYNNPPPNGIYEPNNVTFTAKAERTRIAFYSLYYNTRVADRSSLCGPVIDSVKVVDLSKSAAVAGFSGFSVSLLLLVNALTIAFTLGSL

SEQ ID NO: 127 - DNA, 1098 bp, Populus trichocarpa
atggccgttgggatctcacttttgcttgcatcattcttgctcttcactacctctgctttagctgctacttacatggaaggctttctaaaaaatggcaactttgaagagaaaccaaaacctggcgcgatcaagaaaacagtccttaaaggaaaatatgcgcttcccagctgggaaatcaatggattcgtagagtacatctctgctgggccacaacctggtggcatgtactttaatgtggctcatggtgtccatgcagtaaggctaggcaatgaggcctcaatttctcaaacaataacaataaaagcaggctctctatatgccctcacatttggtgcatcaagaacatgtgcccaagatgaggtgttgagagtctcagttgggaccgtgtttggggacctgcccttgcagacactgtatagtagcaatggcggagacacttatgcttggggatttaaactcaatgccactgttgttaaagtgtcatttcgcaatactggagtccaagaggaccctgcctgtgggccactcattgatgcagttgctatcaaggagctctttccaccaatgcccacaagagataaccttgtaaagaatcatggctttgaggagggtcctcatcggttagtaaacacatccagtggtgtcctcctccctccaagacaagaagatctcacatctccacttcccggctggatgatcgaatcacttaaagctgtgaagttcattgacaaaaagcacttcaacgttccttttgggctcgctgctgtcgagcttgttgcaggaagagaaagtgcaattgcccaaatcctcagaacaattcccgacaaagtctacggtctcacattcaccgtcggggacgcaagaaatggttgccatggatcaatgatggtcgaggcattcgctgctaaggataccttcaaagttccattcgaatccaagggaaagggtgaattcaagaccgtaagtttcaagttcaaagccgttacagctcggacaagaattacgttttacagctcatactaccatactaggattgatgacttcggatccctctgtggtcctatactcgatgaagttagggtattccctattgcttag

SEQ ID NO: 128 - protein, 365 aa, Populus trichocarpa
MAVGISLLLASFLLFTTSALAATYMEGFLKNGNFEEKPKPGAIKKTVLKGKYALPSWEINGFVEYISAGPQPGGMYFNVAHGVHAVRLGNEASISQTITIKAGSLYALTFGASRTCAQDEVLRVSVGTVFGDLPLQTLYSSNGGDTYAWGFKLNATVVKVSFRNTGVQEDPACGPLIDAVAIKELFPPMPTRDNLVKNHGFEEGPHRLVNTSSGVLLPPRQEDLTSPLPGWMIESLKAVKFIDKKHFNVPFGLAAVELVAGRESAIAQILRTIPDKVYGLTFTVGDARNGCHGSMMVEAFAAKDTFKVPFESKGKGEFKTVSFKFKAVTARTRITFYSSYYHTRIDDFGSLCGPILDEVRVFPIA

SEQ ID NO: 129 - DNA, 1110 bp, Populus trichocarpa
atggctttgttcctctctatttgcgttgctctccttttctccttttgccatggcttagctaatgctgccattccacctccacctcttgatggacttgttgaaaatggggattttgaagaggcaccagcaaaatcaaacctcaagaaaacagtgatcataggaaaacactcactcccaaaatgggaaatcaatggcttagtagagtatgtctcaggtgggccacaaccagggggattcttcctagccattcctcggggggtccatgcagtgaggctgggcaatgaggcctctatctctcaaattcttactgtcaaaccaggctcagtctatgcactcacatttggagccaccagaacctgtgctcaagatgaagtgctaagggtctcagtccctggccagtcaagcgacctccctcttcagaccttgtatagcagtgatggtggtgacacttattccttggcttggaaagctacttctaaagctgtcaaggtcacatttcataaccctggtgttcaagaggacccctcttgtggacctctattggatgctattgcaatcaaggagctgccacctctcaagcgtactattggcaacctggttaaaaatggtggctttgaagttggtccacatgtgttcaagaacttctcaactggaatcttgatccctgccaagcaacaagatctaatctcaccactccccggctggatcgttgaatctctcaaacctgtaaaatacattgacaagaagcacttctttgttccctcaggatttgccgcgattgagatggtagctgggagagagagtgccatagcacaagtcattaggacaattcctaacaaattttataacctcacatttacaattggagatgcaaagaatgcttgccatggatctatgatggttgaggcttttgctgccaaggaaactgtcaaagcaccctatgtttctcagggaaagggtggatccaagactgcaagtttaaggttccaggcaatttcagacaggacaaggattacattttacagttcatactatcacaacaagatgcacgattatggtcatatgtgtggccctgtcttggatgatgttagggtgtttccaactcactga

SEQ ID NO: 130 - protein, 369 aa, Populus trichocarpa
MALFLSICVALLFSFCHGLANAAIPPPPLDGLVENGDFEEAPAKSNLKKTVIIGKHSLPKWEINGLVEYVSGGPQPGGFFLAIPRGVHAVRLGNEASISQILTVKPGSVYALTFGATRTCAQDEVLRVSVPGQSSDLPLQTLYSSDGGDTYSLAWKATSKAVKVTFHNPGVQEDPSCGPLLDAIAIKELPPLKRTIGNLVKNGGFEVGPHVFKNFSTGILIPAKQQDLISPLPGWIVESLKPVKYIDKKHFFVPSGFAAIEMVAGRESAIAQVIRTIPNKFYNLTFTIGDAKNACHGSMMVEAFAAKETVKAPYVSQGKGGSKTASLRFQAISDRTRITFYSSYYHNKMHDYGHMCGPVLDDVRVFPTH

SEQ ID NO: 131 - DNA, 1098 bp, Populus trichocarpa
atggctgttgggttttcgcttatgcttgcattgttcttgctcttcattggctctgcctcagctgctacttacatggaaggctttctcaaaaatggcaactttgaagagaaaccaaaacctggtgccatcagaaaaacagtccttaaaggaaaaaatgcactccccagctgggaaatcaatggcttcgtagaatacatctctgctgggccacaacccggtggcatgtactttaatgtggctcatggtgtccatgcggtaaggctaggcaatgaggcctcaatttctcaaacaataacgataaaagcaggctctctttatgccctaacttttggtgcttcaagaacttgtgctcaagacgaggtgttgagagtctcagttggtcctgtgtttggggacctgcctttgcagactctgtatagtagtaatggtggagacacttatgcttggggatttagactcaatgccactgttgttcaagtgacatttcacaataccggggtccaagaggaccctgcgtgtggaccactcattgatgcagttgctatcaaggagctctttccaccaatgcccacgagagataaccttgtaaggaatcatggctttgaggagggtcctcatcggttagtaaacacctccaatggcatcctccttcctccaagacaagaagatctcacatctccactccctggctggattattgaatcacttaaagctgtgaagttcattgacaaaaggcacttcaatgttccctttggacttgctgctgttgagcttgttgcaggaagagaaagtgcaattgcccaaatcctcagaacaactcccaacaaagtctacagtctcgcattcacaatcggagacgcgaggaatggttgccatggatccatgatggttgaggcattcgctgctggtgatacatttaaggttccattcgaatccaaaggaaagggtgaatccaagagcgcaagtttcaagttcaaagccatttcagctaggacaagaattacattttacagttcatactaccatactaggattgatgactacggatccctttgtggtcctatacttgatgaagttagggtatcccctattgcttag

SEQ ID NO: 132 - protein, 365 aa, Populus trichocarpa
MAVGFSLMLALFLLFIGSASAATYMEGFLKNGNFEEKPKPGAIRKTVLKGKNALPSWEINGFVEYISAGPQPGGMYFNVAHGVHAVRLGNEASISQTITIKAGSLYALTFGASRTCAQDEVLRVSVGPVFGDLPLQTLYSSNGGDTYAWGFRLNATVVQVTFHNTGVQEDPACGPLIDAVAIKELFPPMPTRDNLVRNHGFEEGPHRLVNTSNGILLPPRQEDLTSPLPGWIIESLKAVKFIDKRHFNVPFGLAAVELVAGRESAIAQILRTTPNKVYSLAFTIGDARNGCHGSMMVEAFAAGDTFKVPFESKGKGESKSASFKFKAISARTRITFYSSYYHTRIDDYGSLCGPILDEVRVSPIA

SEQ ID NO: 133 - DNA, 1182 bp, Poncirus trifoliata
atggtgaaaagctcttcaacaactagatgggtttctctgtttatgtttgttgttgctcatttggcttcttcaatcctagccgaagatggtttagtggctaatggcgattttgagacatccccgtcgcacggcttcccgagtgagtccagagcagatgggcccacagagattccaagctggaaattaaacggcaccgtagagctggtctcatcagggcaaaaacaaggtgggatgatcctcattgtgccgcagggttctcacgccgttagattaggcaacgatgcagggatcagccaggaagtgaaagttgaaaaagggtctacgtattccgttacgttcagtgcggcgcgcacgtgcgcgcagctggagtcgctgaacgtgtccgtgccacctgcatcacagaccatagacctgcagacattgtataacgtgcaagggtgggacccgtacgcgtgggcttttgaggcagaagacgacaatgtgaagcttctttttaagaacccgggcatggaagatgaccccacttgtgggccaatcattgatgatattgcgatcaagaagcttttcgctcctgataagcccaaagacaatgctgtagtcaatggcgatttcgaagaaggtccgtggatgtttggaaatgtatcgctaggagtcttgcttcccaccaacctcgatgaagagacatcctcattgcctggttggattgttgaatcaaacagagctgtccgttacatcgactcctaccattactcagtcccccaaggaaaacgtgccattgaattagtctcagggaaggaaggcattatctctcaaatggttgaaaccacggcaaacaaggattacagcttgacattttctttaggccacgctggggacaaatgcaagcaaccacttgcagtcatggcatttgctggggatcaagcccaaatagtacattacacagaggatgctaactcgaccttccatgatgctaatgtgaatttcactgccaaagctgatagaacacggattgcattttacagcgtgtattacaatacaagaacagatgacatgagctcattatgtggtccggttgtggatgacgtgagggtgtggttttcaggttctagtaaaattgtatttggacgattgggattaggccttggggttggcttttggttgcttgttttagttctgttttag

SEQ ID NO: 134 - protein, 393 aa, Poncirus trifoliata
MVKSSSTTRWVSLFMFVVAHLASSILAEDGLVANGDFETSPSHGFPSESRADGPTEIPSWKLNGTVELVSSGQKQGGMILIVPQGSHAVRLGNDAGISQEVKVEKGSTYSVTFSAARTCAQLESLNVSVPPASQTIDLQTLYNVQGWDPYAWAFEAEDDNVKLLFKNPGMEDDPTCGPIIDDIAIKKLFAPDKPKDNAVVNGDFEEGPWMFGNVSLGVLLPTNLDEETSSLPGWIVESNRAVRYIDSYHYSVPQGKRAIELVSGKEGIISQMVETTANKDYSLTFSLGHAGDKCKQPLAVMAFAGDQAQIVHYTEDANSTFHDANVNFTAKADRTRIAFYSVYYNTRTDDMSSLCGPVVDDVRVWFSGSSKIVFGRLGLGLGVGFWLLVLVLF

SEQ ID NO: 135 - DNA, 1206 bp, Panicum virgatum
atggagcggggttcgccgagggggaggcgcgcattgctggcgctgtgctcggcgctgcttctcctggcggcgcccgcccggccggtatgggcggctccggtggaggatggcctgctcagcaatggtgactttgagaccgcaccagccggtggttttgtcaaatctgcatctgttgctgagggtgcatcatcaatccctggttggacgatcaatggcacagttgagctgatttcagcaggccagcaccagggtggcatgatccttattgttccacagggggatcatgctgtacggctaggaaatgatgctagtgttgggcaggtggtggaggttgagaagggctcagagtatgctatcacattcagcgctgcccgtacatgtgctcagctggaggcactgaatgtgtccgtgctaggtggtgtatcacagacagtggatttgcagacattgtacaacatagaaggctgggatgcgtatgccctcgcttttcaggcaacagatgagcaggcacatattcagttcatgaaccctggcatggaggatgatccaacctgcgggcctatccttgacaatgtcgccatcaagaagctcttcactccagacaagccaaaggataatgtggttctcaatggagactttgaggaaggtccgtggatgttcccaaacacaagctttggagtgctgctcccgaccaacctcgatgagcaaacatccgccatacctggctggatgatcgagtcaaaccgggctgtccgcttcattgactctgatgaatacaaggttccacaggggaagcgcgccatcgagcttctgtcaggcaaggagggcatcatctcccagatggtggagacaaccccccagaaggagtacagccttacgttcacgctggggacggcgggggactcatgccagccaccgatggccatcatggcgttcgctggcgaccaggcccagaacttccactactcgccgatgggcaacgccaccagccaggccgcaaatgtgacgttcacagcgcgcgccgagaggacacgcgtggcattctacagcgtgtactacaacacgaggagcgacgaccacagctctctgtgcgggccggtgatcgacgacgtccgcgtatggggcttgaacgcggctgccgggttgaaggcaagtgtcgggctggttctcagcattgttggtatggtcggcatggtgctcctctga

SEQ ID NO: 136 - protein, 401 aa, Panicum virgatum
MERGSPRGRRALLALCSALLLLAAPARPVWAAPVEDGLLSNGDFETAPAGGFVKSASVAEGASSIPGWTINGTVELISAGQHQGGMILIVPQGDHAVRLGNDASVGQVVEVEKGSEYAITFSAARTCAQLEALNVSVLGGVSQTVDLQTLYNIEGWDAYALAFQATDEQAHIQFMNPGMEDDPTCGPILDNVAIKKLFTPDKPKDNVVLNGDFEEGPWMFPNTSFGVLLPTNLDEQTSAIPGWMIESNRAVRFIDSDEYKVPQGKRAIELLSGKEGIISQMVETTPQKEYSLTFTLGTAGDSCQPPMAIMAFAGDQAQNFHYSPMGNATSQAANVTFTARAERTRVAFYSVYYNTRSDDHSSLCGPVIDDVRVWGLNAAAGLKASVGLVLSIVGMVGMVLL

SEQ ID NO: 137 - DNA, 1104 bp, Phaseolus vulgaris
atggcacctactctctcttcactgctccttttggctttgctatgtgctgcttcggcttttgctgcccttgagcccagagtaccagaagcttaccttcaaaatgggaactttgaggagcagccgaaccccaaatacctgaagaaaacaaagctggttgggaaatttgctttgcccaaatgggagatcagtggtctgattgagtatgtctctgggggaccccaacctggtggcatgttcttccctgttactcatggaattcatgctgtgagacttggcaatgaggcctcgatctcccaaactatcaaggtcaaacagggtcaactctatgctctgattcttggggcctcaaggacttgtgcacaagatgaagtattgcgaatctctgtgcctccacagactggtgatgttccgttgcagaccctttataacctcaatggtgatgttattgcttgggggtttaaggccacttctaatgttgtcaaagtgactttccacaaccctggagttcaagaagatccagcttgtgggccacttttggatgccattgctatcagggagttctaccctccaatgcctactagagttaacttggtgaaaaatcctggctttgaggagggtccattccccattttcaactctaccaacggtgttctgctccctcctcaacaacaagatgggttctccccacttcctggttggatcattgagtccctcaaggctgtgaagttcattgattcaaagcatttcaatgtcccatttgggctgggggcagtggagcttgtggcaggcagggaaagtgccattgcccaagtcatcagaacagataccaacaaagtctacaacatcacattttcagttggagatgccaaaaatgggtgcaatggatccatgatggttgaagcatttgctgctaaagataccttcaaagttcccttcaaatctgaaggaaagggcacattcaggactgtgagtttcaagttcaaagctattgcaaagagaacaagactcactttctacagctccttctatcataccagaagtgatgattatggttctctttgtggccctgttattgatcaagtcatagtgttccctgttgcctaa

SEQ ID NO: 138 - protein, 367 aa, Phaseolus vulgaris
MAPTLSSLLLLALLCAASAFAALEPRVPEAYLQNGNFEEQPNPKYLKKTKLVGKFALPKWEISGLIEYVSGGPQPGGMFFPVTHGIHAVRLGNEASISQTIKVKQGQLYALILGASRTCAQDEVLRISVPPQTGDVPLQTLYNLNGDVIAWGFKATSNVVKVTFHNPGVQEDPACGPLLDAIAIREFYPPMPTRVNLVKNPGFEEGPFPIFNSTNGVLLPPQQQDGFSPLPGWIIESLKAVKFIDSKHFNVPFGLGAVELVAGRESAIAQVIRTDTNKVYNITFSVGDAKNGCNGSMMVEAFAAKDTFKVPFKSEGKGTFRTVSFKFKAIAKRTRLTFYSSFYHTRSDDYGSLCGPVIDQVIVFPVA

SEQ ID NO: 139 - DNA, 1161 bp, Sorghum bicolor
atggagcttccatggggaatgctgctgctgctggtcctctccgtctcctcctcgtcctcctcctcggctgccgccacgctcgccgtcagtgctccgcccccagtgcctgcgcctcgtcatgctcaagacgctgaagggctgctcatcaacggcaactttgagacggcgccgaggaagctgaacaagacccttatcgtgggccgtcactcgctgcccggatggacggtgcagggtcacgtggagtacgtctcgggcgggccgcagccagggggcatgttcttcgcggtgccgcacggcgtgcacgcgctccgcctcggcagccgcgcgtccgcgtcgcagaacgtgacggtgcgtccgggcgcactatacgcgctgacgttcgcggcgacgcggacgtgcgcgcaggacgagtccctgcgcgtggccgtgtcgccgtcgctctcggcgcccgccgacgtcgccgtgcgcacgctctacagcggcgcgtccgccgacacctgggcctggggtttccgcgcctcctcccccgtcgcgcaggtcacgttcgccaatcccggcgtgcaggaggacgccgcgtgcggcccgctgctggacgccgtcgccatcaaggagctgcccgctgcgtacccgaccaaagacaacctgatcaagaacgatgggttcgagatcggtccccaggtgctgaagaactcgacggtgggcgtgcttcttcccccgaagcagaaggacgcgacgtcgccgcttcccgggtggatcatcgagtcgctcaaggcggtgcggttcatcgacgcggcccacttctccgtcccggcggggcagtacgcggtggagctggtggccgggcgggagagcgccatcgcgcaggtgatccgcaccgtgccgaaccgcgcctacaacctgtcgttcgccgtcggcgacgccaagaacgggtgccacgggtccatgctggtggaggcgttcgcgggcaacgtgacgcagaaggtgccgttcgagtccgcggggaaaggtgggttcaaggcggcggcgttcaggttcgtggccgccggagcacggacccgcctcacgttctacagctcctactaccacaccaaggtcaccgacggcgtctcgctctgcggccccgtgctggaccaggtcaaggtcgtgcccgtgaaggcgtag

SEQ ID NO: 140 - protein, 386 aa, Sorghum bicolor
MELPWGMLLLLVLSVSSSSSSSAAATLAVSAPPPVPAPRHAQDAEGLLINGNFETAPRKLNKTLIVGRHSLPGWTVQGHVEYVSGGPQPGGMFFAVPHGVHALRLGSRASASQNVTVRPGALYALTFAATRTCAQDESLRVAVSPSLSAPADVAVRTLYSGASADTWAWGFRASSPVAQVTFANPGVQEDAACGPLLDAVAIKELPAAYPTKDNLIKNDGFEIGPQVLKNSTVGVLLPPKQKDATSPLPGWIIESLKAVRFIDAAHFSVPAGQYAVELVAGRESAIAQVIRTVPNRAYNLSFAVGDAKNGCHGSMLVEAFAGNVTQKVPFESAGKGGFKAAAFRFVAAGARTRLTFYSSYYHTKVTDGVSLCGPVLDQVKVVPVKA

SEQ ID NO: 141 - DNA, 1197 bp, Sorghum bicolor
atggagccagattcggcgaggaagaggctcgcattgctggctctgcttctcctcctggcggcgcccgcccggccggcctcggcggctccggtggaggatggcctgctcagcaatggcgactttgagacagcaccagccggtggttttgtaaaatctgcgtctgttgctgagggtgcatcgtcaatccctggttggacgatcaatggcacggttgagctcatttcagcaggccagcaccagggtggcatgatcctgattgttccacagggggaccatgctgtaaggctagggaatgatgctagtgttggtcaggtggtggacgttgagaagggctcggaatatgctatcacattcagcgctgcccggacatgtgcgcaactggagtcactgaatgtttctgtgctaggtggcatatcccagacagtagacttgcagacattgtacaacatagaaggctgggacgcgtatgcactggcttttcaggcgacggaagagcaggcacatcttcaattcatgaaccctggcatggaggatgatccaacttgtggtcctatcctagacaacgttgccgtcaagaagctcttcactccggacaaaccgaaggataacgtggtgctgaatggagactttgaggagggtccatggatgttcccgaacacgagctttggcgtgctgctcccaactaaccttgacgagcagacatctgccatacctggttggatgatcgagtcaaaccgcgctgtccgctacattgactctgatgagtacaaggttccccaggggaagcgtgccattgagcttctgtcaggcaaggagggtatcatctcccagatggttgagacgacccctcagaaggtttacagcctgacgttcacactgggcacggcaggggactcgtgccaaccaccaatggccatcatggcgttcgccggggatcaggcccagaacttccactactccccaataggcaacgccaccagccaggctgcgaatgtgacgttcactgcacgtgctgagagaacacgtgtggcattctacagcgtgtactacaacacgaggagtgacgaccacagctctctgtgtgggccggtgatcgacgatgtccgggtatggggcttgaacgcagcggctgggttgaaggcaagtattggactcgttcttggcattgttggtctcgctggcatggtgctcttctga

SEQ ID NO: 142 - protein, 398 aa, Sorghum bicolor
MEPDSARKRLALLALLLLLAAPARPASAAPVEDGLLSNGDFETAPAGGFVKSASVAEGASSIPGWTINGTVELISAGQHQGGMILIVPQGDHAVRLGNDASVGQVVDVEKGSEYAITFSAARTCAQLESLNVSVLGGISQTVDLQTLYNIEGWDAYALAFQATEEQAHLQFMNPGMEDDPTCGPILDNVAVKKLFTPDKPKDNVVLNGDFEEGPWMFPNTSFGVLLPTNLDEQTSAIPGWMIESNRAVRYIDSDEYKVPQGKRAIELLSGKEGIISQMVETTPQKVYSLTFTLGTAGDSCQPPMAIMAFAGDQAQNFHYSPIGNATSQAANVTFTARAERTRVAFYSVYYNTRSDDHSSLCGPVIDDVRVWGLNAAAGLKASIGLVLGIVGLAGMVLF

SEQ ID NO: 143 - DNA, 1110 bp, Solanum lycopersicum
atggcttccttcttttcactttcttttatattaattttctctttatacaacagctttgcttatgctaatactgttccatatcttgatgatctactagaaaatggaaactttgaacaagggccaaaaccatcaaacatgaataaaacagtgatcataggcaaacactccttacccaaatgggaaatcaatagcatagtggagtgggtgtccggtgggccccaggaaggcggattctacttcccgatccctcgtggggcccacgcagtccgactagggaacgaggcttccatctctcaatatgtgaaggtgaaaccaaacacaatatattcactcacatttggagccactaggacttgtgctcaagatgaggtccttaccgtctccgcgggaggcatgtctagtgatcttaacattcaaacattgtacagtgctgatggtggtgacacttatgcttggggtttcaaatcaacatctaatcttgttaaggtcacatttcacaatcctggtactcaagaagatccaacatgtggaccacttatagaccatgttgcaatcaaggaaatgcttatggcaacatatactaaaggtaacttggtgaaaaatggtggatttgaactaggtcctcatgtattcaagaacttttcgacaggggtactcgtcctgcctttaaaacaggacaagtactcaccaattccaggatggatggttcagtttgcaaaaccatcaaaatacatagactcgaagcatttcttcgtgccttcaggaaatgcagctgttgaattgataggaggaagggaaacaggcattgcacagacgatacgtacaatcccaaaacagttctacaacctgactttcaccataggcgatgcacagaacagttgccacggaacaatgacagttcaagcatttgctggaaaggctagtacacaagttaccttcgtatcgaatggaaaaggatggtccaagactgcaaccttcaagttccaggctgattcaattagaacaacaatagctttctacaatccatactatcacacgaagatacacgattttggacacatgtgtggacctgttatcgatgatgttagtcttgttcatgttcgtaaataa

SEQ ID NO: 144 - protein, 369 aa, Solanum lycopersicum
MASFFSLSFILIFSLYNSFAYANTVPYLDDLLENGNFEQGPKPSNMNKTVIIGKHSLPKWEINSIVEWVSGGPQEGGFYFPIPRGAHAVRLGNEASISQYVKVKPNTIYSLTFGATRTCAQDEVLTVSAGGMSSDLNIQTLYSADGGDTYAWGFKSTSNLVKVTFHNPGTQEDPTCGPLIDHVAIKEMLMATYTKGNLVKNGGFELGPHVFKNFSTGVLVLPLKQDKYSPIPGWMVQFAKPSKYIDSKHFFVPSGNAAVELIGGRETGIAQTIRTIPKQFYNLTFTIGDAQNSCHGTMTVQAFAGKASTQVTFVSNGKGWSKTATFKFQADSIRTTIAFYNPYYHTKIHDFGHMCGPVIDDVSLVHVRK

SEQ ID NO: 145 - DNA, 1104 bp, Solanum lycopersicum
atggtgttcaaagtttcagttttgattcttttctcatttctcttcacagcctctgctgttcgcccagctcctcctcttgaaggattacttccaaatggtaattttgaagagctaccaaaggcaaaagacctcaagaagaaaacagtgcttcaaggtaaatatgctttgcccaaatgggagattaatggcttagtggagtatatttctggcgggcctcagcccggtgggatgtactttgcagtcgcccacggtgtccacgctgtgaggcttgggaatgaggcttcaatttctcagacaattccagtcaagaaaggctctttgtatgcacttacttttggggcatcaagaacttgtgctcaagaagaggtgttgagggtgtcagtgcctcctcaaacaggagaccttcctttgcagaccctttatagcagcaatggtggtgatacttatgcttggggtttctacgccacctctaatgttgttaaaattacctttcataatcctggagttcaagaggatcctgcttgtggtccactcttggatgctgttgctatcaaagaactttttccacctcgccctacaagagtgaacttggttaaaaatgctggttttgaagaaggacctcacctcttgataaactcttcacatggagttctcctccctcccaagcaggaagatttgacatccccacttccaggatggatcattgagtcactcaaagcagtgaaattcttggattcagctcatttcaatgtcccgtttggccaagctgcagtggaacttcttgcagggagagaaagtgccctcgcgcaaatcattaggacggtccctaagaaggtctacgccttcacattctctgttggtgatgcaaagaatggttgtcatggtgatatgatggttgaagcatttgctgctaaagaaacgttcaaagttcccttcaaatcacaaggcaaaggcagcttcaaaactgttagtttcaagttcacagctattgcagacagaaccagaattactttctacagttctttttaccacacaaagatcaatgactatggcgctctttgtggccctgttgttgatgaagttaaggtgacccctgttgcttag

SEQ ID NO: 146 - protein, 367 aa, Solanum lycopersicum
MVFKVSVLILFSFLFTASAVRPAPPLEGLLPNGNFEELPKAKDLKKKTVLQGKYALPKWEINGLVEYISGGPQPGGMYFAVAHGVHAVRLGNEASISQTIPVKKGSLYALTFGASRTCAQEEVLRVSVPPQTGDLPLQTLYSSNGGDTYAWGFYATSNVVKITFHNPGVQEDPACGPLLDAVAIKELFPPRPTRVNLVKNAGFEEGPHLLINSSHGVLLPPKQEDLTSPLPGWIIESLKAVKFLDSAHFNVPFGQAAVELLAGRESALAQIIRTVPKKVYAFTFSVGDAKNGCHGDMMVEAFAAKETFKVPFKSQGKGSFKTVSFKFTAIADRTRITFYSSFYHTKINDYGALCGPVVDEVKVTPVA

SEQ ID NO: 147 - DNA, 1194 bp, Saccharum officinarum
  misc_feature (1166)..(1166): n is a, c, g, or t
atggagccagattcggcgaggaagaggctcgcattgctggcgctgctgctcctggcggcgcccgcctgcccggcctcggcggctccggtggaggatggcctgctcagcaatggtgactttgagacagcaccagtcggtggttttgtaaaatctgcgtctgttgctgagggtgcatcgtcaatccctggttggacgatcaatggcacggttgagctcatttcagcaggccagcaccagggtggcatgatcctgattgttccacagggggaccatgctgtaaggctagggaatgatgctagcgttgggcaggtggtggacgttgagaagggctcagagtatgctatcacattcagcgctgcccgaacatgtgcacaactggaggcactgaatgtttccgtgctaggtggcgtatcacagacagtagacttgcagacattgtacaacatagaaggctgggatgcgtacgcgttggcttttcaggcaacggaagagcaggcacatcttcaattcatgaaccctggcatggaggatgatccaacttgtggtcctatcctagacaatgttgccgtcaagaagctcttcactccagacaaaccaaaggataacgtggtgctgaatggagactttgaggagggtccatggatgttcccgaacacgagctttggcgtgctgctcccaactaaccttgacgagcagacatctgccatacctggttggatgatcgagtcaaaccgcgccgtccgctacatagactctgatgagtacaaggttccccaggggaagcgtgccattgagcttctgtcaggcaaggagggtatcatctcccagatggttgagacgacccctcagaaggtttacagcctgacgttcacactgggcacggcgggggactcgtgccaaccaccaatggccgtcatggcattcgcgggggatcaggcccagaacttccactactccccaatgggcaacgccaccagccaggctgcgaatgtgacgttcactgcacgtgctgagagaacacgtgtggcattctacagcgtgtactacaacacgaggagtgacgaccacagctcactgtgtggaccggtgatcgacgacgtccgggtatggggcttgaacgcagcggctgggttaaaggcaagtattggactggttcttggcattgntggtgtcgttggcatggtgctgttctga

SEQ ID NO: 148 - protein, 397 aa, Saccharum officinarum
  misc_feature (389)..(389): Xaa can be any naturally occurring amino acid
MEPDSARKRLALLALLLLAAPACPASAAPVEDGLLSNGDFETAPVGGFVKSASVAEGASSIPGWTINGTVELISAGQHQGGMILIVPQGDHAVRLGNDASVGQVVDVEKGSEYAITFSAARTCAQLEALNVSVLGGVSQTVDLQTLYNIEGWDAYALAFQATEEQAHLQFMNPGMEDDPTCGPILDNVAVKKLFTPDKPKDNVVLNGDFEEGPWMFPNTSFGVLLPTNLDEQTSAIPGWMIESNRAVRYIDSDEYKVPQGKRAIELLSGKEGIISQMVETTPQKVYSLTFTLGTAGDSCQPPMAVMAFAGDQAQNFHYSPMGNATSQAANVTFTARAERTRVAFYSVYYNTRSDDHSSLCGPVIDDVRVWGLNAAAGLKASIGLVLGIXGVVGMVLF

SEQ ID NO: 149 - DNA, 1176 bp, Solanum tuberosum
atggaaatagcttcgagctcaacaaaattcaaatgggtcactgcatttcttcttcttcttacttgctcagctgctggacaagttcaagatggctcgttagttaacggtaattttgagaccccgccgtcaggcggtttctcttccggcgacggattctccgacgggccatccgaaatccccagctggaaatcaaacggcacagtagaggtagtggaatccgggcaaaaacagggtggaatgatcctcatcgtaccacaaggtagacacgcagttcggcttggaaacgacgccgagataagccaagagctcaaagtagagaaaggctccatttactcaatcactttcagcgcggctcgcacgtgcgctcagctagagtcactcaacgtttcagttcctccggcctcacagaccattgatcttcaaactctgtataatgttcagggctgggattcctacgcgtgggcctttcaggctgaagaagatgacgtgcgggtcgtttttacaaatcctggcatggaagatgaccccacttgtggacccattattgatgatattgctatcaagaagcttttcgttccagctaagtcaaaaaataatgcagtacttaatggagactttgaagaaggtccatggatgtttaggaatacttctctcggtgttcttcttccaaccaacctcgacgaggaaacatcatcgctccctggttggatagttgaatcaaatcgagcagttcgatacatcgatacatatcacttcacagttccagaagggaagagagcaatagaattgctttcaggaaaagaaggcattatatcccagatggttgaaaccaagcctaataagccatacagattgacatttttgtttgggcatgcaggggattcatgcaaggaaccactagcaattatggcctttgccggtgatcaagctcaagacatccattacactcccaatttcaattcttcatttcagaatgctaacctgaatttcacggccaaggcggacaggacacgtatcgcgttctatagtatctattacaatacaagaagtgatgatatgagctctctttgtggacctgttgtagatgatgtgagggttgaattgtctgcgtctagcagagtcaaggttttcgggtttgggtttatgttttggttgttagtcttagttttgggctaa

SEQ ID NO: 150 - protein, 391 aa, Solanum tuberosum
MEIASSSTKFKWVTAFLLLLTCSAAGQVQDGSLVNGNFETPPSGGFSSGDGFSDGPSEIPSWKSNGTVEVVESGQKQGGMILIVPQGRHAVRLGNDAEISQELKVEKGSIYSITFSAARTCAQLESLNVSVPPASQTIDLQTLYNVQGWDSYAWAFQAEEDDVRVVFTNPGMEDDPTCGPIIDDIAIKKLFVPAKSKNNAVLNGDFEEGPWMFRNTSLGVLLPTNLDEETSSLPGWIVESNRAVRYIDTYHFTVPEGKRAIELLSGKEGIISQMVETKPNKPYRLTFLFGHAGDSCKEPLAIMAFAGDQAQDIHYTPNFNSSFQNANLNFTAKADRTRIAFYSIYYNTRSDDMSSLCGPVVDDVRVELSASSRVKVFGFGFMFWLLVLVLG

SEQ ID NO: 151 - DNA, 1185 bp, Triticum aestivum
atggagcgagggctcgcattgctgggtctggggctggcgcttcttctgctggcgccctctcgtcgtctcgcctcggccgctccggtggaggacggcctgctcatgaatggtgatttcgagacagcaccacctggcggtttcgtcaaatcggcttcagtttccgagggcgcggcgatcccaagctggacgatcaatggaacagttgagctcatttccgcaggccagcaccagggtggcatgatccttattgttccacaaggggatcatgctgtgcggctagggaatgatgcaggcattgggcaggtggtggaggttgagaagggctcagagtacgcgatcacattcagtgccgcccggacctgcgcgcagctggagtcactgaacatctccgccgggagcgtatcacagacagtcgacttgcagacactttacagcatagaaggctgggatgcatatgccctggctttccaagcagtggatgagcaggcgagcattgagtttaggaaccctggcatggaggacgacccgacctgcgggcctatccttgacaacgtggccatcaagaagctcttctcccccgacaaagcaaaggagaacatggtgatcaatggagactttgaggaggggccatggatgtttccaaacacaagcttcggtgtcctgctcccgacgaaccttgacgagcagacgtcggccttgccagggtggatgatcgagtcgaaccgcgcagtccgcttcgtcgactccgaccagtacaccgtgccccaggggaagcgcgccatcgagcttctctccggcaaggagggcatcatctcgcagatggtggagacgacccctcagaaggcgtacaccctgacgttcacgctgggctcggcaggcgactcgtgccagccgccaatggctgtcatggcattcgccggcgaccaggcccagaacttccactactcccccatgggcaacgccacgagccaggccgtgaacgtgaacttcacggcgcgcgccgagaggacacgcgttgcgctctacagcgtctactacaacacgagaagcgacgaccacagctcgctctgcgggccggtgatagacgacgtccgtgtctggggcttgaatggggctgctgggttgaaggcaagtattgcgctgcttattgccatggctagtgtcatcgttctcgtgctgttctga

SEQ ID NO: 152 - protein, 394 aa, Triticum aestivum
MERGLALLGLGLALLLLAPSRRLASAAPVEDGLLMNGDFETAPPGGFVKSASVSEGAAIPSWTINGTVELISAGQHQGGMILIVPQGDHAVRLGNDAGIGQVVEVEKGSEYAITFSAARTCAQLESLNISAGSVSQTVDLQTLYSIEGWDAYALAFQAVDEQASIEFRNPGMEDDPTCGPILDNVAIKKLFSPDKAKENMVINGDFEEGPWMFPNTSFGVLLPTNLDEQTSALPGWMIESNRAVRFVDSDQYTVPQGKRAIELLSGKEGIISQMVETTPQKAYTLTFTLGSAGDSCQPPMAVMAFAGDQAQNFHYSPMGNATSQAVNVNFTARAERTRVALYSVYYNTRSDDHSSLCGPVIDDVRVWGLNGAAGLKASIALLIAMASVIVLVLF

SEQ ID NO: 153 - DNA, 1158 bp, Theobroma cacao
atgacaatggctacttcattcttgcttgtttgcaccttattggtcactgggtgtgctttaggtccgaaaccttttgtttcagcaaagagaggtgttagaccttatggttcagcaaaaatcgctgctaaaccttttgaaggataccttgaaaatggcaactttgaggaacagccaaaaccaacagacctaaaaaaaacagtacttctaggaaaatatgcacttcctaaatggaccatcagcggtttagtggagtacatcactggtgggccgcaacctggtggcatgtttttccctgtggctcacggtgtccatgccgtgaagcttggcaatgaggcctcaatttctcaaaccataccagtaaaaccaggcaccctttatgcactgacatttggtgcatcaagaacttgtgcgcaagatgaggtgttgagagtctcagtgcctgcccagtcaggggacctccctttgcagaccttgtacagtagctatggcgatgatgtttatgcttgggggtttatagccaaatccaagtatattacagtaacatttcacaaccctggcgttcaagaggatcctacctgtggtccactgttggatgcagttgctattaaggaggttgtccgtccaatgcctacaagaggtaatctggtcaagaacccaggctttgaagaaggtcctcatcgcctagtaaactctacaaatggtgtcttactccctcctcgccaggaggattcaacatcccctctgccgggctggatcatcgaatcacttaaagctgtgaagttcattgattcaaagcacttcaacgtccctgctggaaaggctgcagttgagcttgttgcagggagagaaagtgccattgcccagattttcagaactgtccccaaccaattatatgacctaacgttcatcattggagatgcttggaatggttgccatggagaaatgatggttgaggcatttgctgacaaaaataccgtcaaagttcccttcacatctcgaggaaagggtgaattcaagactgcaagcttgaagttcaaagcagttacagccaggacaaggatcacatttttcagcttttactaccacacaaggattaatgactttggatcactttgcggccctgttttggatgaagttcgggtttcccctgttgcttag

SEQ ID NO: 154 - protein, 385 aa, Theobroma cacao
MTMATSFLLVCTLLVTGCALGPKPFVSAKRGVRPYGSAKIAAKPFEGYLENGNFEEQPKPTDLKKTVLLGKYALPKWTISGLVEYITGGPQPGGMFFPVAHGVHAVKLGNEASISQTIPVKPGTLYALTFGASRTCAQDEVLRVSVPAQSGDLPLQTLYSSYGDDVYAWGFIAKSKYITVTFHNPGVQEDPTCGPLLDAVAIKEVVRPMPTRGNLVKNPGFEEGPHRLVNSTNGVLLPPRQEDSTSPLPGWIIESLKAVKFIDSKHFNVPAGKAAVELVAGRESAIAQIFRTVPNQLYDLTFIIGDAWNGCHGEMMVEAFADKNTVKVPFTSRGKGEFKTASLKFKAVTARTRITFFSFYYHTRINDFGSLCGPVLDEVRVSPVA

SEQ ID NO: 155 - DNA, 1176 bp, Taraxacum officinale
atggcttcacactcagcaacaaccaaatcgttagcactattctgccttctattctctcatttcgttgctgtttttacagcagaagacggcttactaataaacggcgacttcgagacaccgccatcgggaggtttcgccgacgaaggactcggcgacaaccccaacgcaattccgagctggaaagtcaacggcacagtggaactagtcgcctccggtcaaaaacaaggcggaatgatcctaatcgtaccagaaggtcgacacgcagtgagactcggcaacgacgcccaaatcacgcaagaattaaaattagaaaaaggcgaaatctactcaattactttcagtgcatctcgcacgtgtgcacagctggagtcgctaaacgtgtcggttccacctgcgtcacagacgatcgatttgcagacgttgtatagcgttcaagggtgggatacgtacgcgtgggcttttcaggcggatgaagaagacactcatgtcgtttttacaaatcctggcatggaagatgaccccacttgtgggcccatcattgatgatattgctattaaaaagcttttccaacccactaaaccaaaagataacgcagtactaaacggagacttcgaagaaggcccatggatgtttagaaacgcgtctctgggcgtcctgctcccaacaaacctggatgaagaaatctcatccctacctggttggatagtcgagtccaaccgggcagttcgttacatagacgcaaaccacttctcagtcccgggcggcaaacgcgccctggaactgctctcaggcaaagaaggcataatctcacaaatggtcacaaccaccccaaacaaaccctacagaatgtcgttttcgcttggtcacgctgctgacatgcgcaagcaaccgcttgcagtcatggcattcgcaggtgaccaggcggaaaacattcactatgcaccaaatgggaattcgagtttccaaactgtgaatgtgaattttacggctaaggctgagaggacgcgtgtggcgttttatagtgtttattataatacgagaagtgatgatatgagttctttgtgtgggcccgtggttgatgatgtggcggtggttgtttcgaaggggggtagggggttagggttttcggttttagggtttgggttggtggttttggttgtgttgtttgttgtttag

SEQ ID NO: 156 - protein, 391 aa, Taraxacum officinale
MASHSATTKSLALFCLLFSHFVAVFTAEDGLLINGDFETPPSGGFADEGLGDNPNAIPSWKVNGTVELVASGQKQGGMILIVPEGRHAVRLGNDAQITQELKLEKGEIYSITFSASRTCAQLESLNVSVPPASQTIDLQTLYSVQGWDTYAWAFQADEEDTHVVFTNPGMEDDPTCGPIIDDIAIKKLFQPTKPKDNAVLNGDFEEGPWMFRNASLGVLLPTNLDEEISSLPGWIVESNRAVRYIDANHFSVPGGKRALELLSGKEGIISQMVTTTPNKPYRMSFSLGHAADMRKQPLAVMAFAGDQAENIHYAPNGNSSFQTVNVNFTAKAERTRVAFYSVYYNTRSDDMSSLCGPVVDDVAVVVSKGGRGLGFSVLGFGLVVLVVLFVV

SEQ ID NO: 157 - DNA, 1182 bp, Populus trichocarpa
atgtttcaaagctcaacaagaagcaaatggttcactttgtttatgctcgtctttgctctttttgcttctgcaatacttggagaagatgggttggtgacaaacggtgattttgaaacgccaccaatcactggcttccccaaagacgaggccctggttgaagggcccaccgaaattccagggtggaaaacaaacggcaccgtagagctggtatcctccggacagaaacaaggtgcgatgatcctcattgtaccacgaggtgcacacgcagtaagattggggaacgacgctgatatcagccaggaattgacggtcgagaagggatctgtatactcggtcacgttcagtgcggctcgcacgtgcgcgcagctggaatctctaaacgtgtcagtgctacctgcatcacagaccatagacctgcagacattgtataatgtgcaagggtgggacccatacgcgttggcttttgaggcacaggaggataaagtgaggctggttttctcgaatcccggcatggaagatgaccctacttgtgggcctattatcgatgatattgcgatcaaaaagcttttcactcctgagcgacccaaagacaatgcagtaattaatggtgattatgaggaaggcccctggatgtttaataacgtttcactcggagtcctgctcccaaccaaactggatgaggaaacgtcgtcgttgcccggttggattatcgaatcatacagggctgtccgctacatagactcttatcattactccgttccacaaggcaagcgtgccattgaattgctctcaggcaaggaaggcataatctcacagatggttgaaacaacacccagcaagccttacacgatgtcgtttgccttgggccatgccggggacaaatgcaagcagccacttgcagtcatggccttcgccggtgatcaggcccaaaatatccattacacacccgactccaactccaccttccaggttgctaacctcaacttcacagccaaggccgacaggacccgtattgcattttatagcgtgtactacaataccaggagtgatgatatgagctcgttgtgtgggccagtggtggacgatgttcgggtatggttttcaggggcaagaaggattggatttggggggcttggtttggggcttgggctgtgggtgtctgttttggctctgctttattaa

SEQ ID NO: 158 - protein, 393 aa, Populus trichocarpa
MFQSSTRSKWFTLFMLVFALFASAILGEDGLVTNGDFETPPITGFPKDEALVEGPTEIPGWKTNGTVELVSSGQKQGAMILIVPRGAHAVRLGNDADISQELTVEKGSVYSVTFSAARTCAQLESLNVSVLPASQTIDLQTLYNVQGWDPYALAFEAQEDKVRLVFSNPGMEDDPTCGPIIDDIAIKKLFTPERPKDNAVINGDYEEGPWMFNNVSLGVLLPTKLDEETSSLPGWIIESYRAVRYIDSYHYSVPQGKRAIELLSGKEGIISQMVETTPSKPYTMSFALGHAGDKCKQPLAVMAFAGDQAQNIHYTPDSNSTFQVANLNFTAKADRTRIAFYSVYYNTRSDDMSSLCGPVVDDVRVWFSGARRIGFGGLGLGLGLWVSVLALLY

SEQ ID NO: 159 - DNA, 1182 bp, Populus trichocarpa
atgtttcaaagctcaacaagaagcaaatggttcactttgtttatgctcgtctttgttctttttgcttctgcaatacttggagaagatgggttggtgacaaacggtgattttgaaacgccaccaatcactggcttccccaaagacgaggccctggttgaagggcccaccgaaattccagggtggaaaacaaacggcaccgtagagctggtatcctccggacagaaacaaggtgcgatgatcctcattgtaccacgaggtgcgcacgcagtaagattggggaatgacgctgatatcagccaggaattgacggtcgagaagggatctgtatactcggtcacgttcagtgcggctcgcacgtgcgcgcagctggaatctctaaacgtgtcagtgctacctgcatcacagaccatagacctgcagacattgtataatgtgcaagggtgggacccatacgcgttggcttttgaggcacaggaggataaagtgaggctggttttctcgaatcccggcatggaagatgaccctacttgtgggcctattatcgatgatattgcgatcaaaaagcttttcactcctgagcgacccaaagacaatgcagtaattaatggtgattatgaggaaggcccctggatgtttaataacgtttcactcggagtcctgctcccaaccaaactggatgaggaaacgtcgtcgttgcccggttggattatcgaatcatacagggctgtccgctacatagactcttatcattactccgttccacaaggcaagcgtgccattgaattgctctcaggcaaggaaggcataatctcacagatggttgaaacaacacccagcaagccttacacgatgtcgtttgccttgggccatgccggggacaaatgcaagcagccacttgcagtcatggccttcgccggtggtcaggcccaaaatatccattacacacccgactccaactccaccttccaggttgctaacctcaacttcacagccaaggccgacaggacccgtattgcattttatagcgtgtactacaataccaggagtgatgatatgagctcgttgtgtgggccagtggtggacgatgttcgggtatggttttcaggggcaagaaggattggatttggggggcttggtttggggcttgggctgtgggtgtctgttttggctctgctttattaa

SEQ ID NO: 160 - protein, 393 aa, Populus trichocarpa
MFQSSTRSKWFTLFMLVFVLFASAILGEDGLVTNGDFETPPITGFPKDEALVEGPTEIPGWKTNGTVELVSSGQKQGAMILIVPRGAHAVRLGNDADISQELTVEKGSVYSVTFSAARTCAQLESLNVSVLPASQTIDLQTLYNVQGWDPYALAFEAQEDKVRLVFSNPGMEDDPTCGPIIDDIAIKKLFTPERPKDNAVINGDYEEGPWMFNNVSLGVLLPTKLDEETSSLPGWIIESYRAVRYIDSYHYSVPQGKRAIELLSGKEGIISQMVETTPSKPYTMSFALGHAGDKCKQPLAVMAFAGGQAQNIHYTPDSNSTFQVANLNFTAKADRTRIAFYSVYYNTRSDDMSSLCGPVVDDVRVWFSGARRIGFGGLGLGLGLWVSVLALLY

SEQ ID NO: 161 - DNA, 1104 bp, Triphysaria sp.
atggctcgttttttccttttcatactcttaatctcatgcaacaatttagcttctgcaatagtttatccacctccacttgatgggctacttgaaaatggaaactttgaacgaggccctaaccctagatacctgaggaaaacagtgatcatcggaaaacactctctcccgggatgggaaatcagtggcctcgtcgagtatgtctccggtgggccccagccagggggcttctacttcgccgtcccacgtggagtccacgcggtgaggctcggaaacgaggcctccgtgtcgcagcacgtcaagaatctgaaaccgggggcgatctacacgctcacgtttggggcaacgaggacttgtgcacaacatgaggagctcacggtttcggtccccgggttgttgagccgtctcccgatccaaacgttgtatggcacggacggaggggacacgtacgcgtggagcttcaaggcgagttcgaatatggttaaagtcacgtttcataatcatggtacacaagaggatccggcgtgtggaccgcttttagatgccattgctatcaaggaaatgcagcccctgagatacacaagaggaaacttggtgaaaaacgggggattcgaaatcggcccacacactttcaagaacttctccaccggtgtccttgtcctcccgaagggccaagacttgtactcgccgatcccgggatggatagtcgagtcacttaaaccggtcaaatacatcgactcgagacatttcattgtacccgtcggactagcagcaatcgagttggtgggagggagagaaaccgccatttcacagatcatcaggacacagcctaacaaaatgtatagtctctcattcaccattggagatgcaaagaatggatgtaacgggacgatgacagttgaagcttttgcggggaggaatagtttgaaagtcccgtttacgtcccatggaaagggttggtttaagaaagctagtcttgggtttcaagcggtttcggcgaggactagaattacgttctatagtccattttatcataccaggttgtatgattttggtcatatgtgtggccctgttttggatgatgttaaggttgttccagtagcttag

SEQ ID NO: 162 - protein, 367 aa, Triphysaria sp.
MARFFLFILLISCNNLASAIVYPPPLDGLLENGNFERGPNPRYLRKTVIIGKHSLPGWEISGLVEYVSGGPQPGGFYFAVPRGVHAVRLGNEASVSQHVKNLKPGAIYTLTFGATRTCAQHEELTVSVPGLLSRLPIQTLYGTDGGDTYAWSFKASSNMVKVTFHNHGTQEDPACGPLLDAIAIKEMQPLRYTRGNLVKNGGFEIGPHTFKNFSTGVLVLPKGQDLYSPIPGWIVESLKPVKYIDSRHFIVPVGLAAIELVGGRETAISQIIRTQPNKMYSLSFTIGDAKNGCNGTMTVEAFAGRNSLKVPFTSHGKGWFKKASLGFQAVSARTRITFYSPFYHTRLYDFGHMCGPVLDDVKVVPVA

SEQ ID NO: 163 - DNA, 1104 bp, Triphysaria sp.
atgtcactgaaacctactctcttgcttgttctttgttttctctacactgctgctgctcttgttccacctcttccttttgaagggcttctaccaaatggcaacttcgaagagaaaccaaaacccacaagcctccacaaaacaaagctcctaggcaaaaacgcccttcccaaatggcaaatcaagggcctcgtcgaatacatctccggcgggccacagcccggcggaatgttcttcgccgtagcccacggcatccacgccgttcgcctcggcaacgaggcctccatatcccagacaatctccgtcaagagtgggtccctatacgcgctcactttcggcgcgtcgagaacgtgcgcgcaagacgaggtgctccgattgtcggtgggccctcaaacaggggatctgcctctgcaaaccctgtatagcagcaacggcggggacacatacgcttgggggtttagagctacttctaagaatgtaacggtgtcgttttctaaccccgggaagcaagaggacccggcgtgtggcccccttttggacgccgttgcgattaaagagcttttccctccgatgcccacaagaggtaacctggtcaagaacggtggttatgaagagggcccacatcgctttctcaactcttcggtcggtgttctcctcccaccgaaacaacaagactcgacctccccgctccctggctggatcattgagtccctaaaggccatcaaatatattgacgccaagaattttaacgtccctcatgggaaagccgcggtcgagctactcgcgggccgagagagcgccattgcccaaatcatccgaaccgtccctaacaaatcatacgacctcacgttcgtaattggggatgccaagaacgggtgtcacggatcaatgatggtcgaagcctttgccgctaaagaagcgatgaaagctccttttcaatcccgagggaaaggggagtttaaggcttatagttttaagttcactgcggtgtcgttgaggacgagattgactttctatagctcgttctaccataccaagatcgatgaccttggaagtctttgtggtccggttcttgatgaggttcgtgttttaccttccaaggcttaa

SEQ ID NO: 164 - protein, 367 aa, Triphysaria sp.
MSLKPTLLLVLCFLYTAAALVPPLPFEGLLPNGNFEEKPKPTSLHKTKLLGKNALPKWQIKGLVEYISGGPQPGGMFFAVAHGIHAVRLGNEASISQTISVKSGSLYALTFGASRTCAQDEVLRLSVGPQTGDLPLQTLYSSNGGDTYAWGFRATSKNVTVSFSNPGKQEDPACGPLLDAVAIKELFPPMPTRGNLVKNGGYEEGPHRFLNSSVGVLLPPKQQDSTSPLPGWIIESLKAIKYIDAKNFNVPHGKAAVELLAGRESAIAQIIRTVPNKSYDLTFVIGDAKNGCHGSMMVEAFAAKEAMKAPFQSRGKGEFKAYSFKFTAVSLRTRLTFYSSFYHTKIDDLGSLCGPVLDEVRVLPSKA

SEQ ID NO: 165 - DNA, 1104 bp, Vitis vinifera
atggctctgtttctctcactctgccttgtgttcttctctatcgtctgcagctctgcttctgcaactcttcctccatatcttgatgggcttcttccaaatggggactttgagaaagggcccaaggcgtcaaatctgaagaagacagtgataaaagggaagcactcactcccggactgggagatcaagggcttggtggagtatgtttcaggtgggccgcagccaggtgggttcttcctggctgttcctcgtggggtacatgcagtgaagcttgggaatgaggcttcgatctctcagaatgttcgagtgaggcctggcttcatctactcgctcacctttggggccactaggacttgtgcccaagacgaggtgttgagggtgtccatccctggtcaatcggcagatctccctatccagactctgtatagtactgatggtggagacacctatgcttgggctttcaatgccaccacagaagttgtcaatgtcacattccacaaccctgggattcaagaggatcgcacctgtggacccctgttggatgctattgcaattaagcagatgccacctctcaagcttaccagaggtagtctagctaaaaatggaggatatgaaactggcccacacgtgttcaagaacttctcaactggggtcctcctccttcccaagcaacaagacctgatctcaccactccctggatggatcattgagtccctcaaaccagtgaaatacatagattcaaagcacttctcagtccccacaggacttgctgcaattgagctgattggagggagagaaagtgccattgcccaaatcataaggacagtgcccaacaaatcctacaacctcacatttactattggagatgccaagaatggctgccatggatccatgacggtcgaggcttttgcagctaaggaaactgtcaaagtcccccatgcatctcaaggcaagggtgagttcaaggctgcaagtctcaaattcaaagcactttcagctagaacaaggataacattctacagtgcctattaccataccaagcttcatgactttggtcatatgtgtggccctgttttggatgatgttagggtctatcccgtctcttaa

SEQ ID NO: 166 - protein, 367 aa, Vitis vinifera
MALFLSLCLVFFSIVCSSASATLPPYLDGLLPNGDFEKGPKASNLKKTVIKGKHSLPDWEIKGLVEYVSGGPQPGGFFLAVPRGVHAVKLGNEASISQNVRVRPGFIYSLTFGATRTCAQDEVLRVSIPGQSADLPIQTLYSTDGGDTYAWAFNATTEVVNVTFHNPGIQEDRTCGPLLDAIAIKQMPPLKLTRGSLAKNGGYETGPHVFKNFSTGVLLLPKQQDLISPLPGWIIESLKPVKYIDSKHFSVPTGLAAIELIGGRESAIAQIIRTVPNKSYNLTFTIGDAKNGCHGSMTVEAFAAKETVKVPHASQGKGEFKAASLKFKALSARTRITFYSAYYHTKLHDFGHMCGPVLDDVRVYPVS

SEQ ID NO: 167 - DNA, 1107 bp, Vitis vinifera
atggcggttttgatctcactcttgcttgctctctcctctgtgttcttcactggacctgcttttgcaggcacatatttggaaggactcctcccaaatggcaactttgaagagtcacccaagccaactgacctcaagaaaacagtgatcaagggaaaatactcactacccaaatgggaaatcaatggctctgttgagtacattgccggtgggcctcagcctggcggaatgttctttgctgtggcacatggcgtccacgccgtgaggcttggcaatgaggcttccatttcacaaaccataccagtgaagccaggctctctatatgcactaacctttggggcatcaagaacttgtgcccaagatgaggtattgagagtctcagttcccccccaaacaggggacctccccctgcagacactctatgacagctttggaggtgatgtttatgcttggggattcagagccacttctaatgaggccaaggtgactttccacaatactggagtccaagaggatcctgcttgtggcccgctcttggatgcagttgctatcaaggagctcttccctccaatgccaaccagagataacttggtcaagaacagtggattcgaggaaggtcctcatctgttgatcaactcttccaatggtgtcctcctccctcccaaacaggaagatctcacatccccgctgcccggttggatcattgagtccctcaaagctgtgaagttcatagacaaaaagcacttcaacgtccccttcggccttgctgcagttgaactcctcgcaggaagagaaagcgccattgcccaggtccttcgaacagttcccaacaagctctacaatctcacattcagcataggagacgggaagaatggttgccatggagacatgatgatcgaagcatttgcagctaaagacagcttcaaagctcccttcaaatccagaggaaaaggagagttcaagactgtaagtttcaagttcaaagccattgcagccaggaccagactcacattcttcagctctttctaccacaccaggattgatgactttggatcgctctgtggccctgtcctcgatcaagttagggttttctcaatccgtaagccttaa

SEQ ID NO: 168 - protein, 368 aa, Vitis vinifera
MAVLISLLLALSSVFFTGPAFAGTYLEGLLPNGNFEESPKPTDLKKTVIKGKYSLPKWEINGSVEYIAGGPQPGGMFFAVAHGVHAVRLGNEASISQTIPVKPGSLYALTFGASRTCAQDEVLRVSVPPQTGDLPLQTLYDSFGGDVYAWGFRATSNEAKVTFHNTGVQEDPACGPLLDAVAIKELFPPMPTRDNLVKNSGFEEGPHLLINSSNGVLLPPKQEDLTSPLPGWIIESLKAVKFIDKKHFNVPFGLAAVELLAGRESAIAQVLRTVPNKLYNLTFSIGDGKNGCHGDMMIEAFAAKDSFKAPFKSRGKGEFKTVSFKFKAIAARTRLTFFSSFYHTRIDDFGSLCGPVLDQVRVFSIRKP

SEQ ID NO: 169 - DNA, 1155 bp, Zea mays
atgctgctgacgctgctgctggtcctctccgtctcgtcctcgacatcgacgtcggctgctgccaccctcgccgtcagcgctccgcccccactgcctgttcctcctcctcgtcatgctcaagacgccgaaggcatgctcatcaacggcaacttcgagacggcgccgcggaggctgaacaagaccctcatcgtggggcgccactcgctgccggggtggacggtgcaggggcacgtggagtacgtctcgggcggtccccagcccgggggcatgttcttcgcggtgccgcacggcgtgcacgcgctgcgcctcggcagccgcgcgtcggcgtcgcagaatgtgacggtgcggccgggggcgctgtacgcgctcacgttcgcggcgacgcggacgtgcgcgcaggacgaggccctgcgcgtggcggtggcgccgtcgctctcggcgcccgccgacgtcgccgtgcgcacgctctacagcggcgcgtccgccgacacctgggcctggggcttccgcgcctcctcccccgtcgcgcaggtcacgttcgccaaccccggcgtgcaggaggaccccgcgtgcggcccgctgctggacgctgtcgccatcaaggagctgcccgcgccgtacccgaccaaagacaacctgatcaagaacgacggcttcgagatcggtccccaggtgctcaggaactcgacggtcggcgttctgctgccccccaagcagaaggacgcgacgtcgccgctgcccggctggatcatcgagtcgctcaaggcggtgcggtttatcgacgcggcccacttctctgtccccgcggggcagtacgcggtggagctggtggccgggcgggagagcgccatcgcgcaggtcatccgcaccgtgcccaaccgcgcctacaacctgtcgttcgccgtcggcgacgcccggaacggctgccacggctctatgctggtggaggcgttcgcgggcaacgtcacgcagaaggtgccgttcgattccgcggggaaaggcgggttcaagacggcggcgttcaggttcgtggccggcggcgtccgcacccgcctcaccttctacagctcctactaccacaccaaggtcaccgacggcgtctcgctctgcggccccgtgctggaccaggtcaaggttgtgcctgtcaaggcgtag

SEQ ID NO: 170 - protein, 384 aa, Zea mays
MLLTLLLVLSVSSSTSTSAAATLAVSAPPPLPVPPPRHAQDAEGMLINGNFETAPRRLNKTLIVGRHSLPGWTVQGHVEYVSGGPQPGGMFFAVPHGVHALRLGSRASASQNVTVRPGALYALTFAATRTCAQDEALRVAVAPSLSAPADVAVRTLYSGASADTWAWGFRASSPVAQVTFANPGVQEDPACGPLLDAVAIKELPAPYPTKDNLIKNDGFEIGPQVLRNSTVGVLLPPKQKDATSPLPGWIIESLKAVRFIDAAHFSVPAGQYAVELVAGRESAIAQVIRTVPNRAYNLSFAVGDARNGCHGSMLVEAFAGNVTQKVPFDSAGKGGFKTAAFRFVAGGVRTRLTFYSSYYHTKVTDGVSLCGPVLDQVKVVPVKA

SEQ ID NO: 171 - DNA, 1194 bp, Zea mays
aagaagttatacatccatacttcccaagaccactggcaccgagagattcagatttcagaacaacaccatgccaacgacaccaacaatgccaagaaccagcccaatacttgccttcaacccagccgcggcgttcaatgcccatacccggacatcgtcaatcaccgggccacacagcgagctgtggtcgtcactcctcgtgttgtagtacacgctatagaacgccacacgtgttctctcagcgcgtgcagtgaacgtcacattcgcagcctggctggtggcgttgcccattggggagtagtggaagttctgggcctgatcccccgcgaatgccatgacggccattggtggttggcacgagtcccccgccgtgcccagtgtgaacgtcaggctgtaaaccttctgaggggtggtctcgaccatctgggagatgataccctccttgcctgacagaagctcaatggcacgcttcccctggggaaccttgtactgatcagagtctatgtagcggacagcgcggtttgactcgatcatccagccaggtatggcagatgtctgctcatcaaggttagttgggagcagcacgccaaagctggtgttcgggaacatccaagggccctcctcaaagtctccattcagcaccacgttatcctttggtttgtccggagtgaagagctttttgacagcaacgttgtctaggatgggaccacaagttggatcatcctccatgccagggttcatgaattgaagatgtgcctgctcttccgtcgcctgaaaagccaacgcgtacgcatcccagccttctatgttgtacaacgtctgcaagtctactgtctgagacacgccacctagcacggaaacattcagtgcctccagttgtgcacatgtccgggcagcactgaatgtgatagcatactccgaacccttctcaacgtccaccacctgcccaacgctagcatcattccctagccttactgcatggtccccctgtggaacaatcaggatcatgccaccctggtgttggcctgctgaaatgagttcaaccgtgccgttgatcgtccaaccagggattgacgatgcaccctcagcaacagacgcagattttacaaaaccaccagttggtgctgtctcaaagtcaccattgctgatcaggccatcctccaccggagccgccgaggccgggcggacgggcgccgc

SEQ ID NO: 172 - protein, 397 aa, Zea mays
MEADSARKRLALLALLLLAAPVRPASAAPVEDGLISNGDFETAPTGGFVKSASVAEGASSIPGWTINGTVELISAGQHQGGMILIVPQGDHAVRLGNDASVGQVVDVEKGSEYAITFSAARTCAQLEALNVSVLGGVSQTVDLQTLYNIEGWDAYALAFQATEEQAHLQFMNPGMEDDPTCGPILDNVAVKKLFTPDKPKDNVVLNGDFEEGPWMFPNTSFGVLLPTNLDEQTSAIPGWMIESNRAVRYIDSDQYKVPQGKRAIELLSGKEGIISQMVETTPQKVYSLTFTLGTAGDSCQPPMAVMAFAGDQAQNFHYSPMGNATSQAANVTFTARAERTRVAFYSVYYNTRSDDHSSLCGPVIDDVRVWALNAAAGLKASIGLVLGIVGVVGMVLF

SEQ ID NO: 173 - DNA, 1173 bp, Zea mays
atggagctcccgtggggaatgctgctgccgctgctgctggtcctctccgtctcgtccccgtcctcgtcgtcggctgctgccacgctcgccgtcaccgctccgcccccactgcctgttcctcctcctcgtcatgctcaagacgccgaaggcatgctcatcaacggcaacttcgagacggcgccgcggaggctgaacaagaccctcatcgtggggcgccactcgctgccggggtggacggtgcaggggcacgtggagtacgtctcgggcggtccccagcccgggggcatgttcttcgcggtgccgcacggcgtgcacgcgctgcgcctcggcagccgcgcgtcggcgtcgcagaacgtgacggtgcggccgggggcgctgtacgcgctcacgttcgcggcgacgcggacgtgcgcgcaggacgaggccctgcgcgtggcggtggcgccgtcgctctcggcgcccgccgacgtcgccgtgcgcacgctctacagcggcgcgtccgccgacacctgggcctggggcttccgcgcctcctcccccgtcgcgcaggtcacgttcgccaaccccggcgtgcaggaggaccccgcgtgcggcccgctgctggacgccgtcgccatcaaggagctgcccgcgccgtacccgaccaaagacaacctgatcaagaacgacggcttcgagatcggtccccaggtgctcaggaactcgacggtcggcgtgctgctgccccccaagcagaaggacgcgacgtcgccgctgcccggctggatcatcgagtcgctcaaggcggtgcggttcatcgacgcggctcacttctctgtccccgcggggcagtatgcggtggagctggtggccgggcgggagagcgccatcgcgcaggtcatccgcaccgttcccaaccgcgcctacaacctgtcgttcgccgtcggcgacgcccggaacggctgccacggctccatgctggtggaggcgttcgcgggcaacgtcacgcagaaggtgccgttcgattccgccgggaaaggcgggttcaagacggcggcgttcaggttcgtggccggcggcgtccgcacccgcctcaccttctacagctcctactaccacaccaaggtcaccgacggcgtctcgctctgcggccccgtgctggaccaggtcaaggttgtgcctgtcaaggcgtag

SEQ ID NO: 174 - protein, 390 aa, Zea mays
MELPWGMLLPLLLVLSVSSPSSSSAAATLAVTAPPPLPVPPPRHAQDAEGMLINGNFETAPRRLNKTLIVGRHSLPGWTVQGHVEYVSGGPQPGGMFFAVPHGVHALRLGSRASASQNVTVRPGALYALTFAATRTCAQDEALRVAVAPSLSAPADVAVRTLYSGASADTWAWGFRASSPVAQVTFANPGVQEDPACGPLLDAVAIKELPAPYPTKDNLIKNDGFEIGPQVLRNSTVGVLLPPKQKDATSPLPGWIIESLKAVRFIDAAHFSVPAGQYAVELVAGRESAIAQVIRTVPNRAYNLSFAVGDARNGCHGSMLVEAFAGNVTQKVPFDSAGKGGFKTAAFRFVAGGVRTRLTFYSSYYHTKVTDGVSLCGPVLDQVKVVPVKA

SEQ ID NO: 175 - DNA, 1194 bp, Zea mays
atggagccagattcggcgacgacgaggctcgcattgctggcgctgcttctcctggcggcgcccgcccgcccggcctcagcggctccggtggaggatggcctgctcagcaatggtgactttgagacggcaccagccggcggttttgtaagatctgcgtctgttgctgagggtgcatcgtcaatccctggttggacaatcaatggcacagtcgagctcatttcagcaggccagcaccagggtggcatgatcctgattgttccacagggagaccatgctgtaaggctagggaatgatgctagcgttgggcaggtggtggacgtcgagaagggctcggactacgctgtcacattcagcgctgcccggacatgtgcacaactggaggcactgaacgtctccgtgctaggtggcgtgtcgcagacagtagatttacagacgttgtacaacatagaagggtgggacgcgtacgcgctggcttttcaggcgacggaagagcaggcgcatcttcagttcatgaaccctggcatggaggacgatccaacttgtggccccatcctagacaacgttgctgtcaagaagctcttcactccggacaaaccaaaggataacgtggtgctgaatggagactttgaggagggcccttggatgttcccgaacaccagctttggcgtgctgctcccaactaaccttgatgagcagacatctgccatacctggctggatgatcgagtcaaaccgcgctgtccgctacatagactctgatcagtacaaggttccccaggggaagcgtgccattgagcttctgtcaggcaaggagggtatcatctcccagatggtcgagacgacccctgagaaggtttacagcctgacggccatgctgggcgcggcgggggactcgtgccaaccaccaatggccatcatggcgttcgccggggaccaggcccagaacttccattactcaccattgggcaacgccacgagccaggctgtgaacgtgacgttcactgcgcgcgctgagaggacacgcgtggcgttctacagcgtgtactacaacacgaggagtgacgaccacagctcgctgtgcgggccggtgatcgacgacgtccgcgtatggggcttgaacaccgcggctgggttgaaggcgagtgttggactggttcttggcattgttggcgtcgttggcatggtgctgttctga

SEQ ID NO: 176 - protein, 397 aa, Zea mays
MEPDSATTRLALLALLLLAAPARPASAAPVEDGLLSNGDFETAPAGGFVRSASVAEGASSIPGWTINGTVELISAGQHQGGMILIVPQGDHAVRLGNDASVGQVVDVEKGSDYAVTFSAARTCAQLEALNVSVLGGVSQTVDLQTLYNIEGWDAYALAFQATEEQAHLQFMNPGMEDDPTCGPILDNVAVKKLFTPDKPKDNVVLNGDFEEGPWMFPNTSFGVLLPTNLDEQTSAIPGWMIESNRAVRYIDSDQYKVPQGKRAIELLSGKEGIISQMVETTPEKVYSLTAMLGAAGDSCQPPMAIMAFAGDQAQNFHYSPLGNATSQAVNVTFTARAERTRVAFYSVYYNTRSDDHSSLCGPVIDDVRVWGLNTAAGLKASVGLVLGIVGVVGMVLF

SEQ ID NO: 177 - DNA, 1197 bp, Zingiber officinale
atgaataatccactcgctcgtcttccacatctcattgtcctcctcctcctcctcactcattgtgtttcagctgcagtggaagatggcttgattaacaacggggatttcgagactacgccagcgccctcgggcgggaccgctggcaatgacctgggcgaaggaattacctcccttcccggttggaccatcaatggcaccgtcgagctcgtggagtcaggccaaaagcaaggcggcatgattcttatcgttcctgaaggatcgcgtgcgctgcggctgggcaacgaggcgcagatatcgcagggtctacagctggagaaaggggcgtcgtacgcagtcacgtttagctccgcccggacatgcgcgcaactggagtcgcttaacgtgtcggtgtttccggcagcgtcgacggtagaccttcagacgctgtacagcgtcgaggggtgggacgcctacgcctgggctttccaggccgaggccgacgacggcaccgagtcactgctaagcttcaagaatcccggaatggaagacgatcccacttgcggccctatcatcgacaacattgccatcaagaagctcttcactcccgatagacccaaagacaacgccgtcgtgaacggggactttgaggaaggtccgtggatgttccaaaacgccagcctcggcgttcttcttcccaccaacctcgaggaggccatgtcggctctcccgggctggttggtggagtccaatcgtgcggtgcggtacattgactctaaccacttcgtcgttcctcaaggaaagcgcgccgtcgagcttctctcaggcaaggaaggcatcatctcgcagatggtggagacgactcccgacaagcagtacagcctcaccttcaccgtcggcgccgccggagactcctgccaagcgccgctagcggtcatggccttcgccagcgaccaggcgcagaacttccactacgcccccaccggcaacgccactagccagctggccaatatcaccttcacggcgcgcgccgaacgcacgcgcattgccttctacagcgtctactacaacactcggagcgatgaccacagctcgctctgcggccccgttgtggacgacgtcagggtttggggcgtctccagcacggtcactttgacgcgcgcttgcgccgcgtctcttctcagtctgctcgttactgtgctcatggtggtaacagcctga

SEQ ID NO: 178 - protein, 398 aa, Zingiber officinale
MNNPLARLPHLIVLLLLLTHCVSAAVEDGLINNGDFETTPAPSGGTAGNDLGEGITSLPGWTINGTVELVESGQKQGGMILIVPEGSRALRLGNEAQISQGLQLEKGASYAVTFSSARTCAQLESLNVSVFPAASTVDLQTLYSVEGWDAYAWAFQAEADDGTESLLSFKNPGMEDDPTCGPIIDNIAIKKLFTPDRPKDNAVVNGDFEEGPWMFQNASLGVLLPTNLEEAMSALPGWLVESNRAVRYIDSNHFVVPQGKRAVELLSGKEGIISQMVETTPDKQYSLTFTVGAAGDSCQAPLAVMAFASDQAQNFHYAPTGNATSQLANITFTARAERTRIAFYSVYYNTRSDDHSSLCGPVVDDVRVWGVSSTVTLTRACAASLLSLLVTVLMVVTA

SEQ ID NO: 179 - DNA, 1131 bp, Zea mays
atgattagtgatctcttggcttcttgcactacaggcctgctcagcaatggtgactttgagacagcaccaagtggtggttttgtaaaatctgcttctgttgctgagggtgcatcgtcaatccctggttggacgatcaacggcacggttgaactcatttcagcaggccaacaccagggtggcatgatcctgattgttccacagggggaccatgcagtaaggctagggaatgatgctagcgttgggcaggtggtggacgttgagaagggttcggagtatgctatcacattcagtgctgcccggacatgtgcacaactggaggcactgaatgtttccgtgctaggtggcgtgtctcagacagtagacttgcagacgttgtacaacatagaaggctgggatgcgtacgcgttggcttttcaggcgacggaagagcaggcacatcttcaattcatgaaccctggcatggaggatgatccaacttgtggtcctatcctagacaacgttgccgtcaagaagctcttcaccccagacaaaccaaaggataacgtggtgctgaatggagactttgaggagggtccatggatgttccccaacacgagcttcggcgtgctgctcccaactaaccttgacgagcaaacgtctgccatacctggttggatgatcgagtcaaaccgcgccgtccgctacatagactctgatgagtacaaggttccccagggaaagcgtgccattgagcttctgtcaggcaaggaaggtatcatctcccagatggttgagaccacccctcagaaggtttacagcctgacgttcacactgggcacggcgggggactcgtgccaaccaccaatggccgtcatggcattcgcgggggatcaggcccagaacttccactactccccaatgggcaacgccaccagccaggctgcgaatgtgacgttcactgcacgcgctgagagaacacgtgtggcgttctatagcgtgtattacaacacgaggagtgacgaccacagctcgctgtgtggcccggtgattgacgatgtccgggtatgggcattgaacgccgcggctgggttgaaggcaagtattgggctggttcttggcattgttggtgtcgttggcatggtgttgttctga

SEQ ID NO: 180 - protein, 376 aa, Zea mays
MISDLLASCTTGLLSNGDFETAPSGGFVKSASVAEGASSIPGWTINGTVELISAGQHQGGMILIVPQGDHAVRLGNDASVGQVVDVEKGSEYAITFSAARTCAQLEALNVSVLGGVSQTVDLQTLYNIEGWDAYALAFQATEEQAHLQFMNPGMEDDPTCGPILDNVAVKKLFTPDKPKDNVVLNGDFEEGPWMFPNTSFGVLLPTNLDEQTSAIPGWMIESNRAVRYIDSDEYKVPQGKRAIELLSGKEGIISQMVETTPQKVYSLTFTLGTAGDSCQPPMAVMAFAGDQAQNFHYSPMGNATSQAANVTFTARAERTRVAFYSVYYNTRSDDHSSLCGPVIDDVRVWALNAAAGLKASIGLVLGIVGVVGMVLF

SEQ ID NO: 181 - protein, 40 aa, Artificial sequence
  motif 1
  VARIANT (2)..(2): Xaa can be Leu, Ala or Met
  VARIANT (3)..(3): Xaa can be Val or Leu
  VARIANT (7)..(7): Xaa can be Asp or Gly
  VARIANT (13)..(13): Xaa can be Trp, Tyr or His
  VARIANT (14)..(14): Xaa can be Met or Ile
  VARIANT (15)..(15): Xaa can be Phe, Leu or Ile
  VARIANT (17)..(17): Xaa can be Asn or Gly
  VARIANT (18)..(18): Xaa can be Thr or Ser
  VARIANT (19)..(19): Xaa can be Ser, Thr or Arg
  VARIANT (20)..(20): / replace = "Leu"
  VARIANT (24)..(24): Xaa can be Leu, Val or Ile
  VARIANT (26)..(26): Xaa can be Pro, Thr or Ser
  VARIANT (27)..(27): Xaa can be Asn, Lys or Met
  VARIANT (28)..(28): Xaa can be Leu, Gln, Asp or Val
  VARIANT (29)..(29): Xaa can be Glu, Asp or Val
  VARIANT (30)..(30): Xaa can be Asp or Glu
  VARIANT (31)..(31): Xaa can be Glu or Asp
  VARIANT (32)..(32): Xaa can be Thr, His or Tyr
  VARIANT (34)..(34): Xaa can be Pro or Ser
  VARIANT (36)..(36): Xaa can be Pro or Ser
  VARIANT (37)..(37): Xaa can be Gly or Pro
  VARIANT (39)..(39): Xaa can be Ile, Met or Thr
  VARIANT (40)..(40): Xaa can be Ile or Val
NXXKNGXFEEGPXXXPXXXXGVLXPXXXXXXXSXLXXWXX

SEQ ID NO: 182 - protein, 25 aa, Artificial sequence
  motif 2
  VARIANT (1)..(1): Xaa can be Val, Leu or Ala
  VARIANT (2)..(2): Xaa can be Glu, Lys, Ala or Thr
  VARIANT (3)..(3): Xaa can be Lys, Pro or Arg
  VARIANT (5)..(5): Xaa can be Ser, Ala or Met
  VARIANT (6)..(6): Xaa can be Leu, Arg or His
  VARIANT (8)..(8): Xaa can be Ser or Ala
  VARIANT (9)..(9): Xaa can be Leu, Ile or Val
  VARIANT (10)..(10): Xaa can be Thr or Ile
  VARIANT (12)..(12): Xaa can be Ser or Gly
  VARIANT (14)..(14): Xaa can be Ala or Ser
  VARIANT (20)..(20): Xaa can be Asp, Leu, Ala or Ser
  VARIANT (22)..(22): Xaa can be Ser, Val, Arg or Leu
  VARIANT (24)..(24): Xaa can be Asn or Arg
  VARIANT (25)..(25): Xaa can be Val or Ile
XXXGXXYXXXFXAXRTCAQXEXLXX

SEQ ID NO: 183 - protein, 14 aa, Artificial sequence
  motif 3
  VARIANT (2)..(2): Xaa can be Pro or Glu
  VARIANT (3)..(3): Xaa can be Ala or Thr
  VARIANT (7)..(7): Xaa can be Leu or Ile
  VARIANT (8)..(8): Xaa can be Ile or Leu
  VARIANT (10)..(10): Xaa can be Ala or Ser
  VARIANT (11)..(11): Xaa can be Val, Ile or Phe
  VARIANT (14)..(14): Xaa can be Lys or Arg
DXXCGPXXDXXAIX

SEQ ID NO: 184 - protein, 29 aa, Artificial sequence
  motif 4
  VARIANT (2)..(2): Xaa can be Met or Leu
  VARIANT (3)..(3): Xaa can be Leu or Val
  VARIANT (4)..(4): Xaa can be Lys or Arg
  VARIANT (7)..(7): Xaa can be Asp or Gly
  VARIANT (14)..(14): Xaa can be Ile or Phe
  VARIANT (15)..(15): Xaa can be Phe, Leu or Ile
  VARIANT (17)..(17): Xaa can be Gly, Asn or Asp
  VARIANT (18)..(18): Xaa can be Thr or Ala
  VARIANT (19)..(19): Xaa can be Ser, Pro or Arg
  VARIANT (24)..(24): Xaa can be Val or Ile
  VARIANT (26)..(26): Xaa can be Pro or Ser
  VARIANT (27)..(27): Xaa can be Met or Asn
  VARIANT (28)..(28): Xaa can be Asp, Ile or Val
  VARIANT (29)..(29): Xaa can be Glu or Val
NXXXNGXFEEGPYXXPXXXWGVLXPXXXX

SEQ ID NO: 185 - protein, 29 aa, Artificial sequence
  motif 5
  VARIANT (2)..(2): Xaa can be Val or Ile
  VARIANT (3)..(3): Xaa can be Ser or Thr
  VARIANT (4)..(4): Xaa can be Val, Ala or Ilee"
  VARIANT (5)..(5): Xaa can be Ser, Ala or Thr
  VARIANT (6)..(6): Xaa can be Pro or Gly
  VARIANT (7)..(7): Xaa can be Glu or Gln
  VARIANT (8)..(8): Xaa can be Ser or Trp
  VARIANT (9)..(9): Xaa can be Gly or Ala
  VARIANT (10)..(10): Xaa can be Val or Glu
  VARIANT (11)..(11): Xaa can be Leu or Ile
  VARIANT (13)..(13): Xaa can be Ile or Met
  VARIANT (16)..(16): Xaa can be Val, Ile or Met
  VARIANT (18)..(18): Xaa can be Thr, Gly or Ser
  VARIANT (20)..(20): Xaa can be Ser or Asn
  VARIANT (26)..(26): / replace = "Ala"
  VARIANT (29)..(29): Xaa can be Phe or Trp
NXXXXXXXXXXPXQTXYXSXGWDSYXWAX

SEQ ID NO: 186 - protein, 15 aa, Artificial sequence
  motif 6
  VARIANT (2)..(2): Xaa can be Ser or Ala
  VARIANT (3)..(3): Xaa can be Ile or Leu
  VARIANT (4)..(4): Xaa can be Thr or Ile
  VARIANT (14)..(14): Xaa can be Ala or Ser
YXXXFSAARTCAQXE

SEQ ID NO: 187 - DNA, 3693 bp, Artificial sequence
  expression cassettte comprising SEQ ID NO: 1
aatccgaaaagtttctgcaccgttttcaccccctaactaacaatatagggaacgtgtgctaaatataaaatgagaccttatatatgtagcgctgataactagaactatgcaagaaaaactcatccacctactttagtggcaatcgggctaaataaaaaagagtcgctacactagtttcgttttccttagtaattaagtgggaaaatgaaatcattattgcttagaatatacgttcacatctctgtcatgaagttaaattattcgaggtagccataattgtcatcaaactcttcttgaataaaaaaatctttctagctgaactcaatgggtaaagagagagattttttttaaaaaaatagaatgaagatattctgaacgtattggcaaagatttaaacatataattatataattttatagtttgtgcattcgtcatatcgcacatcattaaggacatgtcttactccatcccaatttttatttagtaattaaagacaattgacttatttttattatttatcttttttcgattagatgcaaggtacttacgcacacactttgtgctcatgtgcatgtgtgagtgcacctcctcaatacacgttcaactagcaacacatctctaatatcactcgcctatttaatacatttaggtagcaatatctgaattcaagcactccaccatcaccagaccacttttaataatatctaaaatacaaaaaataattttacagaatagcatgaaaagtatgaaacgaactatttaggtttttcacatacaaaaaaaaaaagaattttgctcgtgcgcgagcgccaatctcccatattgggcacacaggcaacaacagagtggctgcccacagaacaacccacaaaaaacgatgatctaacggaggacagcaagtccgcaacaaccttttaacagcaggctttgcggccaggagagaggaggagaggcaaagaaaaccaagcatcctccttctcccatctataaattcctccccccttttcccctctctatataggaggcatccaagccaagaagagggagagcaccaaggacacgcgactagcagaagccgagcgaccgccttctcgatccatatcttccggtcgagttcttggtcgatctcttccctcctccacctcctcctcacagggtatgtgcctcccttcggttgttcttggatttattgttctaggttgtgtagtacgggcgttgatgttaggaaaggggatctgtatctgtgatgattcctgttcttggatttgggatagaggggttcttgatgttgcatgttatcggttcggtttgattagtagtatggttttcaatcgtctggagagctctatggaaatgaaatggtttagggatcggaatcttgcgattttgtgagtaccttttgtttgaggtaaaatcagagcaccggtgattttgcttggtgtaataaagtacggttgtttggtcctcgattctggtagtgatgcttctcgatttgacgaagctatcctttgtttattccctattgaacaaaaataatccaactttgaagacggtcccgttgatgagattgaatgattgattcttaagcctgtccaaaatttcgcagctggcttgtttagatacagtagtccccatcacgaaattcatggaaacagttataatcctcaggaacaggggattccctgttcttccgatttgctttagtcccagaattttttttcccaaatatcttaaaaagtcactttctggttcagttcaatgaattgattgctacaaataatgcttttatagcgttatcctagctgtagttcagttaataggtaatacccctatagtttagtcaggagaagaacttatccgatttctgatctccatttttaattatatgaaatgaactgtagcataagcagtattcatttggattattttttttattagctctcaccccttcattattctgagctgaaagtctggcatgaactgtcctcaattttgttttcaaattcacatcgattatctatgcattatcctcttgtatctacctgtagaagtttctttttggttattccttgactgcttgattacagaaagaaatttatgaagctgtaatcgggatagttatactgcttgttcttatgattcatttcctttgtgcagttcttggtgtagcttgccactttcaccagcaaagttcatttaaatcaactagggatatcacaagtttgtacaaaaaagcaggcttaaacaatgagaagaaaaacagagatgattcagactaccccctgcgtcgcgctgctcttgctcgtcggcgttgcttttgctgctcgatcggcgtcggctatcaccgatggcctgctgccgaatggcaacttcgaggaggcgccggacgagtcgcagatgaacggcacgagggtgacgggtcgctacgcgatacctcagtgggagatctccgggttcgtggagtacatcgggtcgggccagaagcagggagacatgctcctgccggtgccggagggcgcgtacgccgtgcggctgggcaacgaggcctccatccagcagcggcttaccctgacgcggggaatgcactactccatcatattcagcgcggcgcgcacctgcgcccagtccgagctcctcaacatcacgatcacccccgagtccggcgagatccccatccagacggtgtacaccagcagcggctgggactcctactcctgggccttcaaggccaagcacagcgtcgtgttgttcatcgtccacaaccccggtgtctctgatgacgaagcttgcggccccctcatcgactcgttcgccattaagaccctgaaccctcctcaaagaacgaaaggtaacatgctgaagaatgggggcttcgaggagggcccgtacatcttccccaacacgtcctggggcgtgcttgtgccgcccatggacgaggacgactactcgccgctgtccccgtggacgatcctgtcgaccaccaagtccgtcaagtacatcgacgcggcgcactacgctgtgccgggcggcgcccgcgcggttgagctggtgtccggcatggagacggcgatgctgcaggaggtgagcaccgtgcccgggcggtcgtacaggctggagttctccgtcggggacgccggcgacgggtgctccgggtccctgaccgtgcaggcgtacgcgtcgcgcgggagcgtgaaggtgacgtaccagtcgcagggcacgggcggctacaagcgcgggctgctcgagttcacggccacggagaagcggacgcgggtagtgttcgtcagcatggcctacaccacgaagtccgacggcacgctgtgtggtcccgtcatcgacgacgcgtcgctcgtcagtgtccacagccaccgccggttccttctgtaatattatacccagctttcttgtacaaagtggtgatatcacaagcccgggcggtcttctagggataacagggtaattatatccctctagatcacaagcccgggcggtcttctacgatgattgagtaataatgtgtcacgcatcaccatgggtggcagtgtcagtgtgagcaatgacctgaatgaacaattgaaatgaaaagaaaaaaagtactccatctgttccaaattaaaattggttttaaccttttaataggtttatacaataattgatatatgttttctgtatatgtctaatttgttatcatcc

SEQ ID NO: 188 - DNA, 3491 bp, Artificial sequence
  expression cassettte comprising SEQ ID NO: 3
aatccgaaaagtttctgcaccgttttcaccccctaactaacaatatagggaacgtgtgctaaatataaaatgagaccttatatatgtagcgctgataactagaactatgcaagaaaaactcatccacctactttagtggcaatcgggctaaataaaaaagagtcgctacactagtttcgttttccttagtaattaagtgggaaaatgaaatcattattgcttagaatatacgttcacatctctgtcatgaagttaaattattcgaggtagccataattgtcatcaaactcttcttgaataaaaaaatctttctagctgaactcaatgggtaaagagagagattttttttaaaaaaatagaatgaagatattctgaacgtattggcaaagatttaaacatataattatataattttatagtttgtgcattcgtcatatcgcacatcattaaggacatgtcttactccatcccaatttttatttagtaattaaagacaattgacttatttttattatttatcttttttcgattagatgcaaggtacttacgcacacactttgtgctcatgtgcatgtgtgagtgcacctcctcaatacacgttcaactagcaacacatctctaatatcactcgcctatttaatacatttaggtagcaatatctgaattcaagcactccaccatcaccagaccacttttaataatatctaaaatacaaaaaataattttacagaatagcatgaaaagtatgaaacgaactatttaggtttttcacatacaaaaaaaaaaagaattttgctcgtgcgcgagcgccaatctcccatattgggcacacaggcaacaacagagtggctgcccacagaacaacccacaaaaaacgatgatctaacggaggacagcaagtccgcaacaaccttttaacagcaggctttgcggccaggagagaggaggagaggcaaagaaaaccaagcatcctccttctcccatctataaattcctccccccttttcccctctctatataggaggcatccaagccaagaagagggagagcaccaaggacacgcgactagcagaagccgagcgaccgccttctcgatccatatcttccggtcgagttcttggtcgatctcttccctcctccacctcctcctcacagggtatgtgcctcccttcggttgttcttggatttattgttctaggttgtgtagtacgggcgttgatgttaggaaaggggatctgtatctgtgatgattcctgttcttggatttgggatagaggggttcttgatgttgcatgttatcggttcggtttgattagtagtatggttttcaatcgtctggagagctctatggaaatgaaatggtttagggatcggaatcttgcgattttgtgagtaccttttgtttgaggtaaaatcagagcaccggtgattttgcttggtgtaataaagtacggttgtttggtcctcgattctggtagtgatgcttctcgatttgacgaagctatcctttgtttattccctattgaacaaaaataatccaactttgaagacggtcccgttgatgagattgaatgattgattcttaagcctgtccaaaatttcgcagctggcttgtttagatacagtagtccccatcacgaaattcatggaaacagttataatcctcaggaacaggggattccctgttcttccgatttgctttagtcccagaattttttttcccaaatatcttaaaaagtcactttctggttcagttcaatgaattgattgctacaaataatgcttttatagcgttatcctagctgtagttcagttaataggtaatacccctatagtttagtcaggagaagaacttatccgatttctgatctccatttttaattatatgaaatgaactgtagcataagcagtattcatttggattattttttttattagctctcaccccttcattattctgagctgaaagtctggcatgaactgtcctcaattttgttttcaaattcacatcgattatctatgcattatcctcttgtatctacctgtagaagtttctttttggttattccttgactgcttgattacagaaagaaatttatgaagctgtaatcgggatagttatactgcttgttcttatgattcatttcctttgtgcagttcttggtgtagcttgccactttcaccagcaaagttcatttaaatcaactagggatatcacaagtttgtacaaaaaagcaggcttaaacaatggtgctggtggtccccgaggggagccacgcggtgcggctcgggaacgaggcgtcgatccggcagcggctcgccggcgcggcgcgcggcgcgcggtacgcgctcacgttcagcgcggcgcggacgtgcgcgcaggcggagcggctgaacgtgtcggcgtcggggcagtgggcggtgctccccatgcagaccatgtacagcagcaacggctgggactcgtacgcctgggcctgggatgccgccgccgacgcgttcgacgtcgtcatccacaaccccggcgtcaccgaggaccccgcctgcggccccctcatcgactccgtcgccatccgcaccctcaaccctcctcgccgcaccaacaagaacctggtgaagaacggggacttcgaggagggcccgtacatcatcccggggactaggtggggggtgctgatcccgtccatggtggtggacgagcactcgccgctgccggggtggatggtggagtcgctcaaggcggtgaagtacatcgacagcgaccacttcgcggtgccgcgcgggcggcgcgctgtcgagctgctggcggggcgggagagcgcgatcgcgcaggtgatccgcaccgtccccgggaggcagtacgcgctgtcgttcaccgtcggcgacgccagcaacggctgcgaggggtcgctggtggtggaggcgtacgccgggagggagtccaccagggtggcgcacgagtcggctggccgcggcggcgccgccaagcgcgccgtgctgccgttccgcgccgccgcggcgcgcacccgcgtcgtgttcttcagctcgttctacagcaccaggagcgacgacatgagctcgctctgcgggccggtgatcgacgacgtcgccgtcgtcagcgtgcgcgcgcggcggccggcggcgaagcgcggctagggtctagctagcgccattgccgcgatgtcgtactaacccagctttcttgtacaaagtggtgatatcacaagcccgggcggtcttctagggataacagggtaattatatccctctagatcacaagcccgggcggtcttctacgatgattgagtaataatgtgtcacgcatcaccatgggtggcagtgtcagtgtgagcaatgacctgaatgaacaattgaaatgaaaagaaaaaaagtactccatctgttccaaattaaaattggttttaaccttttaataggtttatacaataattgatatatgttttctgtatatgtctaatttgttatcatcc

SEQ ID NO: 189 - DNA, 2194 bp, Oryza sativa
aatccgaaaagtttctgcaccgttttcaccccctaactaacaatatagggaacgtgtgctaaatataaaatgagaccttatatatgtagcgctgataactagaactatgcaagaaaaactcatccacctactttagtggcaatcgggctaaataaaaaagagtcgctacactagtttcgttttccttagtaattaagtgggaaaatgaaatcattattgcttagaatatacgttcacatctctgtcatgaagttaaattattcgaggtagccataattgtcatcaaactcttcttgaataaaaaaatctttctagctgaactcaatgggtaaagagagagattttttttaaaaaaatagaatgaagatattctgaacgtattggcaaagatttaaacatataattatataattttatagtttgtgcattcgtcatatcgcacatcattaaggacatgtcttactccatcccaatttttatttagtaattaaagacaattgacttatttttattatttatcttttttcgattagatgcaaggtacttacgcacacactttgtgctcatgtgcatgtgtgagtgcacctcctcaatacacgttcaactagcaacacatctctaatatcactcgcctatttaatacatttaggtagcaatatctgaattcaagcactccaccatcaccagaccacttttaataatatctaaaatacaaaaaataattttacagaatagcatgaaaagtatgaaacgaactatttaggtttttcacatacaaaaaaaaaaagaattttgctcgtgcgcgagcgccaatctcccatattgggcacacaggcaacaacagagtggctgcccacagaacaacccacaaaaaacgatgatctaacggaggacagcaagtccgcaacaaccttttaacagcaggctttgcggccaggagagaggaggagaggcaaagaaaaccaagcatcctccttctcccatctataaattcctccccccttttcccctctctatataggaggcatccaagccaagaagagggagagcaccaaggacacgcgactagcagaagccgagcgaccgccttctcgatccatatcttccggtcgagttcttggtcgatctcttccctcctccacctcctcctcacagggtatgtgcctcccttcggttgttcttggatttattgttctaggttgtgtagtacgggcgttgatgttaggaaaggggatctgtatctgtgatgattcctgttcttggatttgggatagaggggttcttgatgttgcatgttatcggttcggtttgattagtagtatggttttcaatcgtctggagagctctatggaaatgaaatggtttagggatcggaatcttgcgattttgtgagtaccttttgtttgaggtaaaatcagagcaccggtgattttgcttggtgtaataaagtacggttgtttggtcctcgattctggtagtgatgcttctcgatttgacgaagctatcctttgtttattccctattgaacaaaaataatccaactttgaagacggtcccgttgatgagattgaatgattgattcttaagcctgtccaaaatttcgcagctggcttgtttagatacagtagtccccatcacgaaattcatggaaacagttataatcctcaggaacaggggattccctgttcttccgatttgctttagtcccagaattttttttcccaaatatcttaaaaagtcactttctggttcagttcaatgaattgattgctacaaataatgcttttatagcgttatcctagctgtagttcagttaataggtaatacccctatagtttagtcaggagaagaacttatccgatttctgatctccatttttaattatatgaaatgaactgtagcataagcagtattcatttggattattttttttattagctctcaccccttcattattctgagctgaaagtctggcatgaactgtcctcaattttgttttcaaattcacatcgattatctatgcattatcctcttgtatctacctgtagaagtttctttttggttattccttgactgcttgattacagaaagaaatttatgaagctgtaatcgggatagttatactgcttgttcttatgattcatttcctttgtgcagttcttggtgtagcttgccactttcaccagcaaagttc

SEQ ID NO: 190 - DNA, 56 bp, Artificial sequence
  primer: prm16414
ggggacaagtttgtacaaaaaagcaggcttaaacaatgagaagaaaaacagagatg

SEQ ID NO: 191 - DNA, 50 bp, Artificial sequence
  primer: prm16415
ggggaccactttgtacaagaaagctgggtataatattacagaaggaaccg

SEQ ID NO: 192 - DNA, 52 bp, Artificial sequence
  primer: prm16412
ggggacaagtttgtacaaaaaagcaggcttaaacaatggtgctggtggtccc

SEQ ID NO: 193 - DNA, 47 bp, Artificial sequence
  primer: prm16413
ggggaccactttgtacaagaaagctgggttagtacgacatcgcggca

SEQ ID NO: 194 - protein, 9 aa, Artificial sequence
  signature sequence
FSAARTCAQ

SEQ ID NO: 195 - DNA, 56 bp, Artificial sequence
  primer: prm13182
ggggacaagtttgtacaaaaaagcaggcttaaacaatgtttcaaagctcaacaaga

SEQ ID NO: 196 - DNA, 49 bp, Artificial sequence
  primer: prm13183
ggggaccactttgtacaagaaagctgggtctctttctccccattcaaac

SEQ ID NO: 197 - DNA, 1377 bp, Populus trichocarpa
atgcaagaaaactccaaagatgctcgaaacggcggcgactcgttgtcgacaacgccaacgcaggtctccaaaaaaccacgcgtcagcttctccataacagaacacgaaatccaccatgaattctctcaccacaaccctaatgtagcccgaattaacaacggtagcttcggtagctgccccggatccgtacttgctgctcaaaagaactggcagctccagttccttcaacaacctgacgacttctacttcaacactctccgtaaaggaattctccactcacgtactgtcatcaaagacctcatcaatgctgacgacgtcgacgagatctcccttgtcgataacgccaccactgccgccgccatcgtccttcaacaaattggccgtgccttcgctgaaggtaattttgctaaaaacgataccgttttaatgctccactgtgcttatcaagctgttaaaaaatcgattcaagcttacgtcacgcgtgctgggggttctgttatcgagattcagttaccgtttccggttacttcgaatgaggagataatttcggagtttaagagaggaatagagaaaggcaaagctaacggtaaaaaaattaggttagcgataattgatcatataacgtcgatgccgtgtgttgttattccggtaaaagagttggttaaaatttgcagagaagaaggtgtggatcaggtttttgttgatgcagctcatgctattggtagtgttgaaataaatgttaaagaaatcggggctgatttttatgtcagtaatttgcataagtggttcttttgccccccatcggttgcttttctgtattgtaagaaagcagcgagtttggaatttgatgtacaccatccggttgtttcacatgagtatggaaatggattgccgatagagagtgcgtggattgggactagggattatagctcacaattagtggtgccggcagctttggagtttgttaatcgatttgaggatgggattcaggggataatgaagaggaaccatgaggaggttgttaagatggggaaaatgctggccgaatcatgggggacaaatcttggttcttcaccggagatgtgtgcgggaatgatcatggttggtctgccttcgagattgcgtgtttcaagtgaagatgatgctttgaggttaagatcgcatttgcgtgagtgtcatggggttgaggttccgatacattatcagggtttaaaagatggtgaggagggagtgaaagataaggatggggttataacagcgtatgctaggatttctcatcaggtttataataagtctgaggattattgcaagcttagggatgctgtaaatcgtctttctgagaatctactgattcgcaaaacgttttatccagagtga

SEQ ID NO: 198 - protein, 458 aa, Populus trichocarpa
MQENSKDARNGGDSLSTTPTQVSKKPRVSFSITEHEIHHEFSHHNPNVARINNGSFGSCPGSVLAAQKNWQLQFLQQPDDFYFNTLRKGILHSRTVIKDLINADDVDEISLVDNATTAAAIVLQQIGRAFAEGNFAKNDTVLMLHCAYQAVKKSIQAYVTRAGGSVIEIQLPFPVTSNEEIISEFKRGIEKGKANGKKIRLAIIDHITSMPCVVIPVKELVKICREEGVDQVFVDAAHAIGSVEINVKEIGADFYVSNLHKWFFCPPSVAFLYCKKAASLEFDVHHPVVSHEYGNGLPIESAWIGTRDYSSQLVVPAALEFVNRFEDGIQGIMKRNHEEVVKMGKMLAESWGTNLGSSPEMCAGMIMVGLPSRLRVSSEDDALRLRSHLRECHGVEVPIHYQGLKDGEEGVKDKDGVITAYARISHQVYNKSEDYCKLRDAVNRLSENLLIRKTFYPE

SEQ ID NO: 199 - DNA, 1377 bp, Zea mays
atgcggtacagtaaaaacgtgtttcattacagactagagtctacaagaacgagtagtcagcagataacatgctacagcagttcatactttcatcaagaaattgaagtgagtgaacaaaggtaaagacattgtaattaagcgtaataacagtttcagttagaaataaccttctcagaaggtctcagcttggtgcaggagaaaccatcaagaacaagcttgcctacggcatctctcaagacctcatactcctccgtgacattgtaaacctgatgtgagattctcacgtaccctgtcacttgatcgcccttggccatctcttgtccttcctcaacacttcttgagttgttgaatattggcacctcgaccttgaattggttcctcagcatgtccctcactctcatcgcatcatcatcgctctcaatgccaaggcaacctggcagcccgaccatagccatgcttccgcacatttccggcggcgagccaagaaacgtcccccaagcctcggcgagcatcgtgcccatctcgatcaccttctcatggttccgtttgcttatcgcctcgatgccgccctcgaaccgtctcatgaagtcaacggcatcaggcacaacgagctgggcactgtaatcccgcacgccgatccaggcgctctccatgggtagcccgttgccgtactcgctagacacgacggggtggtggagctgcgaggctacggggtcatccttgcggatgtgcaggaaggccacggcggaagggcagaagaaccacttgtggaggttgctggtgtagaagtcggcgccgatgtcgcgcacgtcgatgggcacctggccgatggcgtgcgccccgtcgacgaagaccttgtccacgccctcctcgcggcagatggcgacgagctccttcacggggaggaggacgctgggcatcgaggtgatgtggtcgatgacggcgaggcggactctgcggcccccagcctgggcgagcgcgagcgcggcacggaactcggcgacgacggcgaccgccgaggcgacggggaacgggagcggcacctcgacgacggtggcccccgcgcggaccacgtacgcgtggatggacttcttgacggagctgtaggtgtagtggagcatgagcaccacgtcgccgcgtgcgaaggcgccctccgcgaagctccaggccacgtgctgcatgatgatggccgcggccgtggtagcgttgtcgacgagggagacctcggaggcgtcacccgccccgacggcggacgccacggcggcacgcgagcgggcgagccccggctggagagagtcgaagtagaacgcgtcgggctgagagagaaaaagccgttgccaccgcgccctcgccgcgaggaccgacgccgggcagcag

SEQ ID NO: 200 - protein, 458 aa, Zea mays
MASAPHDDAAKGRNAAPPEKRTSATITEADIRAEFAHHDGTVARVNNGTFGCCPASVLAARARWQRLFLSQPDAFYFDSLQPGLARSRAAVASAVGAGDASEVSLVDNATTAAAIIMQHVAWSFAEGAFARGDVVLMLHYTYSSVKKSIHAYVVRAGATVVEVPLPFPVASAVAVVAEFRAALALAQAGGRRVRLAVIDHITSMPSVLLPVKELVAICREEGVDKVFVDGAHAIGQVPIDVRDIGADFYTSNLHKWFFCPSAVAFLHIRKDDPVASQLHHPVVSSEYGNGLPMESAWIGVRDYSAQLVVPDAVDFMRRFEGGIEAISKRNHEKVIEMGTMLAEAWGTFLGSPPEMCGSMAMVGLPGCLGIESDDDAMRVRDMLRNQFKVEVPIFNNSRSVEEGQEMAKGDQVTGYVRISHQVYNVTEEYEVLRDAVGKLVLDGFSCTKLRPSEKVISN

SEQ ID NO: 201 - DNA, 1365 bp, Arabidopsis lyrata
atggagtcgggcgagcggcgcaatggcgattcgatgagtcacaatcaccgcgctccgaagaagccacgcctcgctgggttattaaccgagtcagatatcgactccgagttcgctcaccaccagaccggtgttgccaggatcaacaacggtagcttcgggtgctgtcccggctccgttctcgaggcgcagcgtgagtggcagcttcgttatcttcgtcagcctgatgagttctacttcaacggtctccgtcgtggacttgtcgcttctcgaactgtgatcagtgacctaatcaacgccgatgatgttgacgaggtctcgctcgttgataacgccaccactgctgcagctattgttcttcagaaagttggaaggtgtttctcggaagggaagtataagaaggaagatacggttgtgatgtttcactgtgcgtttcagagtgtgaagaagtcgattcaggcttatgtctctcgtgtgggaggttttactgttgaggttaggttacctttccctgttaattcgaacgaagagattatctccaagtttagagaaggattagagaaaggtagagcgaatggtagaacggttaggttagctatcattgaccatataacgtcgatgccgtgtgttttgatgccggtacgagaattggttaaaatctgcagagaagaaggtgtggagcaggtttttgttgatgcagctcatgccattggtagtgttaaagttgatgttaaagaaatcggagctgattactatgtgagtaatctgcataaatggttattttgtccgccgtctatcgcgtttttctattgtaagaaacgtggttctgagtctgatgttcatcaccctgtggtgtctcatgagtttggaaatggtttgcctatagaaagtgcctggattgggactagggattacagttcgcagcttgtggttccatcggtaatggagtttgtaaacaggttcgagggagggatcgaagggattatgattaggaaccatgatgaagctgttagaatggggttaatgctggctgatgcttggggaacgaatctcgggtcacctcctgaaatgtgtgttgggatggttatgatcggtttaccttcaaaactttgtgttgaaagtgatgaagatgctactaagttgcggtcatatctgcgggtgcattactcagtcgaggttccagtttattttctcggattgagggatggagaggaaggagtgaaagacaaagacagtggactaattactgcctatgttcggatctctcatcagatttataacaaaactgaggattatgagagattgagagacgcaataacagagttagtcaaggatcaaatgacttgtcaaaaccttccttcagggtag

SEQ ID NO: 202 - protein, 454 aa, Arabidopsis lyrata
MESGERRNGDSMSHNHRAPKKPRLAGLLTESDIDSEFAHHQTGVARINNGSFGCCPGSVLEAQREWQLRYLRQPDEFYFNGLRRGLVASRTVISDLINADDVDEVSLVDNATTAAAIVLQKVGRCFSEGKYKKEDTVVMFHCAFQSVKKSIQAYVSRVGGFTVEVRLPFPVNSNEEIISKFREGLEKGRANGRTVRLAIIDHITSMPCVLMPVRELVKICREEGVEQVFVDAAHAIGSVKVDVKEIGADYYVSNLHKWLFCPPSIAFFYCKKRGSESDVHHPVVSHEFGNGLPIESAWIGTRDYSSQLVVPSVMEFVNRFEGGIEGIMIRNHDEAVRMGLMLADAWGTNLGSPPEMCVGMVMIGLPSKLCVESDEDATKLRSYLRVHYSVEVPVYFLGLRDGEEGVKDKDSGLITAYVRISHQIYNKTEDYERLRDAITELVKDQMTCQNLPSG

SEQ ID NO: 203 - DNA, 1413 bp, Arabidopsis lyrata
atggcgtcgtctctatctccaccggaaaaagcttcgtatcaccaccgtcactcctccaaaagatactccaccaacggaaacgtcgaatcatcatcggtttccgatttcgtcaaacgaccgaaaatctctcctcagaattacatatcttgttccgagatcgagtcagagttttctcatcatgatccagaatttgctagaatcaacaacggtagctttggttgttgtccatcatcaatcctcgctttacaacgagattggcaactccggttccttcgtcaaccggatcgattctatttcgacgaactcaaaccgaaaatctccgattctagatctgtaatcaaacggttaatcaacgccgatcacgacgatgaagtctcaatcgttgataacgccacaactgcagctgcaatcgttcttcaacaaaccgcttgggcttttcgtgaaggaaggttcgataaaggcgacgcggtggttatgcttcattacgcttatggctctgtgaagaaatctgttgaagcgtatgttacacgctccggtggacacgtcatcgaggtacagttaccttttccagttaactcggcggatgaaattattgaccggtttaggattggtttagaatcgggtaaagcgaatggtaggagagttaggttagctttgattgatcatgtgacttctatgccaagtgttgtgattcctattaaagagcttgtgaagatttgtagaagagaaggtgttgaccaagtttttgttgatgctgctcatgggattggttgtgttgatgttgatatgaaggagattggtgctgatttctatacgagtaatcttcataagtggtttttcgcaccgccttctgttgctttcttgtattgtaggaaatcgagtaatggtggtggtggtgttgcggatttgcatcatcctgttgtgtcgaatgagtatgggaacggtttggcggttgagagttcttgggttggaactagagattatagtgctcagttggtggttccttcgattttggagtttgtgaatcggtttgaaggtgggattgatggtattaagaagaggaatcatgaatctgtggttgagatgggtcatatgttggttaagtcttgggggactcagctcggttgtccgcctgagatgtgtgcgagtatgatcatggtcgggttgccggtgtatttaggagtgtcgagtgattcagatgttttgaagcttagaacgtttttgagagaaaagttcagaattgaaatcccgatctactttaggccacctgaggacggagagattgatccaatcacgggatatgtgcgtatttctttccaagtttacaacaaacctgaggattatcataggcttagggacgcaataaacgaacttgtgagagatgggttcagatgcgcatctctatctagttga

SEQ ID NO: 204 - protein, 470 aa, Arabidopsis lyrata
MASSLSPPEKASYHHRHSSKRYSTNGNVESSSVSDFVKRPKISPQNYISCSEIESEFSHHDPEFARINNGSFGCCPSSILALQRDWQLRFLRQPDRFYFDELKPKISDSRSVIKRLINADHDDEVSIVDNATTAAAIVLQQTAWAFREGRFDKGDAVVMLHYAYGSVKKSVEAYVTRSGGHVIEVQLPFPVNSADEIIDRFRIGLESGKANGRRVRLALIDHVTSMPSVVIPIKELVKICRREGVDQVFVDAAHGIGCVDVDMKEIGADFYTSNLHKWFFAPPSVAFLYCRKSSNGGGGVADLHHPVVSNEYGNGLAVESSWVGTRDYSAQLVVPSILEFVNRFEGGIDGIKKRNHESVVEMGHMLVKSWGTQLGCPPEMCASMIMVGLPVYLGVSSDSDVLKLRTFLREKFRIEIPIYFRPPEDGEIDPITGYVRISFQVYNKPEDYHRLRDAINELVRDGFRCASLSS

SEQ ID NO: 205 - DNA, 1365 bp, Arabidopsis thaliana
atggaggcgggagagcggcgcaatggcgattcgatgagtcacaatcaccgcgcaccgaagaagccacgtctcgctgggttattaaccgagtcagatatcgactctgagttcgctcaccaccagaccggtgttgccagaatcaacaacggtagcttcgggtgctgtcctggctccgttctcgaggcgcaacgcgagtggcagcttcgttatctccgtcagcctgatgagttctacttcaacggtctccgtcgtggacttctcgcttctcgaactgtgatcagtgacctaatcaacgccgatgatgttgatgaggtctctctcgttgataacgccaccactgctgctgctattgttcttcagaaagttggaaggtgtttctcggaagggaagtataagaaggaagatactgtagtgatgtttcactgtgcgtttcagagtgtgaagaagtcgattcaggcttatgtctctcgtgtgggaggttctactgttgaggttaggttacctttccctgtaaattcgaacgaagagattatctccaagtttagagaaggactagagaaaggtagagcgaatggtagaacggttaggttagctatcattgatcatataacgtcgatgccgtgtgttttgatgccggtacgagaattggttaagatctgcagagaggaaggtgtggagcaggtttttgttgatgcagctcatgccattggtagtgttaaagttgatgtgaaagaaatcggagctgattactatgtgagtaatctgcataaatggttcttttgtccaccgtctatcgcgtttttctattgtaagaaacgtggttctgagtctgatgttcatcaccctgtggtgtctcatgagtttggaaatggtttgcctatagaaagtgcctggattgggactagggattacagttcacagcttgtggttccatctgtgatggagtttgtaaacaggttcgagggagggatggaagggataatgatgaagaaccatgatgaagctgttagaatgggtttaatgctggctgatgcttggggaacgaatctagggtcacctccagaaatgtgtgttgggatggttatgatcggtttaccttcaaaactctgtgttggaagtgatgaagatgctattaagttgcggtcatatctgcgggttcattactcagttgaggttccagttttttatctcggattgagggatggagaggaaggagtgaaagacaaagacagtggactaattactgcgtatgttcggatctctcatcaggtctataacaaaactgaggattatgagagattgagagacgcaataacagagttagtcaaggatcagatgacttgtcaaaaccttcctgcattgtag

SEQ ID NO: 206 - protein, 454 aa, Arabidopsis thaliana
MEAGERRNGDSMSHNHRAPKKPRLAGLLTESDIDSEFAHHQTGVARINNGSFGCCPGSVLEAQREWQLRYLRQPDEFYFNGLRRGLLASRTVISDLINADDVDEVSLVDNATTAAAIVLQKVGRCFSEGKYKKEDTVVMFHCAFQSVKKSIQAYVSRVGGSTVEVRLPFPVNSNEEIISKFREGLEKGRANGRTVRLAIIDHITSMPCVLMPVRELVKICREEGVEQVFVDAAHAIGSVKVDVKEIGADYYVSNLHKWFFCPPSIAFFYCKKRGSESDVHHPVVSHEFGNGLPIESAWIGTRDYSSQLVVPSVMEFVNRFEGGMEGIMMKNHDEAVRMGLMLADAWGTNLGSPPEMCVGMVMIGLPSKLCVGSDEDAIKLRSYLRVHYSVEVPVFYLGLRDGEEGVKDKDSGLITAYVRISHQVYNKTEDYERLRDAITELVKDQMTCQNLPAL

SEQ ID NO: 207 - DNA, 1428 bp, Arabidopsis thaliana
atggcgtcgtctctatctccaccggaagaagcttcgtatcaccaccgtcataccaaaaggtacacctcctccgcttcctccgcttcctccaccaccaacggaaccgtcgaatcatcggtttccgatttcgtcaaacgtcccaaaatctctcatccgaattacatatcaagttccgagatcgaatcagagttttctcatcacgatccagatttcgcaagaatcaacaacggtagttttggttgttgtccgtcatcaatcctagctttacaacgagattggcagctccggttccttcgtcaaccggatcgattctatttcgacgaactcaaaccaaaaatctccgattctagatctgtaatcaaacggttaataaacgccgagcatgacgatgaagtctcgatcgtcgataacgcaacaaccgcagctgcaatcgttcttcaacaaaccgcttgggcttttcgtgaaggtcggttcgataaaggcgacgcggtggttatgcttcattacgcttatggctctgtgaagaaatctgttgaagcgtatgttacacgctccggtggacacgtcaccgaggtacagttaccttttccggttatttcggcggatgagattattgaccggtttaggattggtttagagtctggtaaagcgaatggtaggagagttaggttagctttgattgatcatgtgacttctatgccaagtgttgtgattcctattaaagagcttgtgaagatttgtagaagagaaggtgttgaccaagtttttgttgatgctgctcatgggataggttgtgttgatgttgatatgaaggagattggtgctgatttctatactagtaatcttcataagtggtttttcgcaccgccttctgttgctttcttgtattgtaggaaatcgagtaatggtggtgttgcggatttgcatcatcccgttgtttcgaatgagtatgggaacggtttggcggttgagagttcgtgggttggaactagagattatagtgctcagttggtggttccttcgatattggagtttgtaaatcggtttgaaggcgggattgatggtattaagaagaggaatcatgagtctgttgttgagatgggtcaaatgttggttaagtcttgggggactcagctcggttgtccccctgagatgtgtgcgagtatgatcatggttgggttgccagtgtgtttaggagtgtcgagtgagtcggatgttttgaagcttagaacgtttttaagagaaaagttcagaattgaaatcccaatctactttaggccaccaggggatggagagattgatccgatcacgggatatgtgcgtatttcttttcaagtttacaacaaacctgaggattatcataggctcagggacgcaataaacgggcttgttagagatgggttcaaatgcacgtctctatcttgttga

SEQ ID NO: 208 - protein, 475 aa, Arabidopsis thaliana
MASSLSPPEEASYHHRHTKRYTSSASSASSTTNGTVESSVSDFVKRPKISHPNYISSSEIESEFSHHDPDFARINNGSFGCCPSSILALQRDWQLRFLRQPDRFYFDELKPKISDSRSVIKRLINAEHDDEVSIVDNATTAAAIVLQQTAWAFREGRFDKGDAVVMLHYAYGSVKKSVEAYVTRSGGHVTEVQLPFPVISADEIIDRFRIGLESGKANGRRVRLALIDHVTSMPSVVIPIKELVKICRREGVDQVFVDAAHGIGCVDVDMKEIGADFYTSNLHKWFFAPPSVAFLYCRKSSNGGVADLHHPVVSNEYGNGLAVESSWVGTRDYSAQLVVPSILEFVNRFEGGIDGIKKRNHESVVEMGQMLVKSWGTQLGCPPEMCASMIMVGLPVCLGVSSESDVLKLRTFLREKFRIEIPIYFRPPGDGEIDPITGYVRISFQVYNKPEDYHRLRDAINGLVRDGFKCTSLSC

SEQ ID NO: 209 - DNA, 1335 bp, Aquilegia sp.
atgaaccaccacaacaacaacaacaataacaacaaccatgtttccaagaaattgaaactatcaacaattacgaattcagaaattcgccaagaattcgaacaccatgataaaaagaccgcgcgaattaacaacggaagttttggaagttgtccagcaacaatattagcagcacagaaacaatggcaattaaagtttcttcaacaaccagatgatttctatttcaatcaacttcgaaaagggattaatgaatcaagaaatttaattaaagatttaattaatgctgaacatgttgatgaagtttctattgttgataatgcaactactgctgctgcaattgttcttcaacaaattggttgggcttttactgaaggtagatttcaaaaaggtgatgctgctgtaatgttacattatgcttatggtgctgtcaagaaatcaattcaagcttatgttagtcgtgctggtggatttgtaattgaggtacaattaccatttcctgttaactctaatgaagagattatatgtgaatttaagaaagcattacaacaagggaaattgaatggtagaaaagttagattagctgtaattgatcatattacttcaatgccaagtgttgttattcctattaaggagttggttcagatttgtagaaaagaaggtgttgatcaggtttttgttgatgctgctcatgctattgggaatgttgatattgatgttaaggatattggggctgatttttatactagtaatttgcataaatggtttttttgtccaccagcggttgcgtttttgtattgcaagaaatcggataaactgtccgatttacatcatccagtggtttctaatgagtatgggaatggcttggctattgagagtgcttggattggtactagggattatagttcccaattagttgttccatctgtgttggaatttgttaacaggtttgaaggtggtattcaaggaattaagaaaaggaatcatgatgctgctattgagatggggaaaatgttagctaaggcctggggaacaaatcttggttcacctccagagttgtgttgtagcatggtcatggttgggttgccttctagtttggagatttcaagtgaagcagatggtatgttgttcagaactcatttgcgtgagtcttttgggattgaagttccaatatattacaaggacccaaaaagtggtaatattgaagatggagttacaacagggtatgtcaggatctctcaccaaatttacaacacaattgatgactacaacagattacgggatgccattaaccagctcatccaggatgggtttacttgcaagagccttctctctcgctga

SEQ ID NO: 210 - protein, 444 aa, Aquilegia sp.
MNHHNNNNNNNNHVSKKLKLSTITNSEIRQEFEHHDKKTARINNGSFGSCPATILAAQKQWQLKFLQQPDDFYFNQLRKGINESRNLIKDLINAEHVDEVSIVDNATTAAAIVLQQIGWAFTEGRFQKGDAAVMLHYAYGAVKKSIQAYVSRAGGFVIEVQLPFPVNSNEEIICEFKKALQQGKLNGRKVRLAVIDHITSMPSVVIPIKELVQICRKEGVDQVFVDAAHAIGNVDIDVKDIGADFYTSNLHKWFFCPPAVAFLYCKKSDKLSDLHHPVVSNEYGNGLAIESAWIGTRDYSSQLVVPSVLEFVNRFEGGIQGIKKRNHDAAIEMGKMLAKAWGTNLGSPPELCCSMVMVGLPSSLEISSEADGMLFRTHLRESFGIEVPIYYKDPKSGNIEDGVTTGYVRISHQIYNTIDDYNRLRDAINQLIQDGFTCKSLLSR

SEQ ID NO: 211 - DNA, 1329 bp, Brassica napus
atggcgtctctctctccgccggaagaagaagccgccgccgccgccgcttcctttcaccaccgtcgctccaaacgctattcctcctccaccaccaacggcctcgccgccgaatcggttcccgacaaacgccacaagatctctctccctccgagtttcatttcatcctccgagatcgagtcagagttctcccaccacgaccccgccttcgcgcggatcaacaacggaagcttcggcagctgtccctcctccgtcatcgccgcccagcgggactggcagctccggttcctccgccagccggatcggttcttcttcgacgagctcaagcccaacatctccgcatccagagccgcgatcaaacgcctcatcaacgccgagcacgacgacgaggtctccctcgtcgacaacgccaccacggcggcggccatcgtcctccagcaaaccgcctgggccttccgggaaggccggttcgacagaggcgacgcggtggtgatgctccactacgccttcggctcggtgaagaaatcggtggaagcgtacgtctcacgctccggtggggaggtcatcgagatgcagctaccgttcccggttaactcggcggaagaaatagtcaaccggtttaggaccggtttagcattggggaaggcgaacggtaggaaggtcaggttagctttgatcgatcacgtgacgtcgatgcctagcgtcgtgataccgatcaaggagcttgtgaagatatgtagagaggaaggcgttgaccaagtgttcgttgacgctgctcatgggatcggttgtgtcgacgtggacatgaaggagattggcgctgacttctacactagtaacctccacaagtggttcttcgcgccgccttccgttgctttcttgtattgcaagaggtccggtgctggtggtaatctccatcatccggtcgtgtctcacgagtacgggaacggtttagcggttgagagcacgtgggtcgggactagagactacagtgctcagctggtcgtgccttcgattctggagtttgtgaaccggtttgaaggtgggatcgatggtataaagaagaggaaccatgagtcggtgattgagatgggggagatgctggtcaagtcttgggggacgcagctaggttgtccgccggagatgtgtccgagtatggtgatggttgggttgcctgtgtgtttaggtgtgtcgagtgagacggatgctgtgaggcttaggaaccttttgagagagaggttcagcattgagataccgacttactttagagcgcctggtgagggagagactgattcgatcacgggggaaacaagctatttcgagggggagtaa

SEQ ID NO: 212 - protein, 442 aa, Brassica napus
MASLSPPEEEAAAAAASFHHRRSKRYSSSTTNGLAAESVPDKRHKISLPPSFISSSEIESEFSHHDPAFARINNGSFGSCPSSVIAAQRDWQLRFLRQPDRFFFDELKPNISASRAAIKRLINAEHDDEVSLVDNATTAAAIVLQQTAWAFREGRFDRGDAVVMLHYAFGSVKKSVEAYVSRSGGEVIEMQLPFPVNSAEEIVNRFRTGLALGKANGRKVRLALIDHVTSMPSVVIPIKELVKICREEGVDQVFVDAAHGIGCVDVDMKEIGADFYTSNLHKWFFAPPSVAFLYCKRSGAGGNLHHPVVSHEYGNGLAVESTWVGTRDYSAQLVVPSILEFVNRFEGGIDGIKKRNHESVIEMGEMLVKSWGTQLGCPPEMCPSMVMVGLPVCLGVSSETDAVRLRNLLRERFSIEIPTYFRAPGEGETDSITGETSYFEGE

SEQ ID NO: 213 - DNA, 849 bp, Citrus clementina
atggatcaagaagctcgaaacggcgaattgactcaccacgtctctaaaaaacccaaactcactcgctgcatatccgaagccgaaatccgcgacgagttctctcaccaccaacacggcgttgcccgcatcaacaacgggagcttcgggagctgccccaagtccgtactcgccgaccagcaaaagtggcagctcaaattcctccaacaaccggacgacttctacttcaactctctccgcaaggggattctggagtcacgtgccgccgtcaaggacctcatcaacgccgatgacgtcggcgaaatctcacttgtcgacaacgcaaccaccgctgccgccatcgtcctccagcaaattggccgcggttttaccgaggggaggttccacagaaacgataccgttttgatgcttcactgcgccttccaagccgttaaaaaatctatccaagcttacgtcacccgtgcaggtgggtctgttgttgaagttcagttaccgtttccgttagcctcggaggaagaaattatcaatgagtttaaaaaggggattgaaaagggtaaaaaagatggaaaaatgatacggttagcaatcatcgatcacattacatcaatgccatgtgttgtgattcccgttcgtaaattggttaaaatttgtagagatgaaggtgtggatcaggtctttgtagatgcggcacatgctatgggtagtattaaaattgatgtgaaagaaattggagccgatttctatgttagtaatttgcacaagtggtttttttgcccaccatctgtagtcttcttgtattgcagaaaatcaattttatcgtctgatatgcatcaccccggtggtttcacctga

SEQ ID NO: 214 - protein, 282 aa, Citrus clementina
MDQEARNGELTHHVSKKPKLTRCISEAEIRDEFSHHQHGVARINNGSFGSCPKSVLADQQKWQLKFLQQPDDFYFNSLRKGILESRAAVKDLINADDVGEISLVDNATTAAAIVLQQIGRGFTEGRFHRNDTVLMLHCAFQAVKKSIQAYVTRAGGSVVEVQLPFPLASEEEIINEFKKGIEKGKKDGKMIRLAIIDHITSMPCVVIPVRKLVKICRDEGVDQVFVDAAHAMGSIKIDVKEIGADFYVSNLHKWFFCPPSVVFLYCRKSILSSDMHHPGGFT

SEQ ID NO: 215 - DNA, 1335 bp, Citrus sinensis
atggatactattggagctgatactaaaatatccaatacctacttgcctgaaaagcctgaactttcaccaactttgatttcagacactgaactcctatctgaattctcacaccatgtccaaaacatagctagaatcaataatggaagctttggttgttgcccgaagagtgttatatcagcacagcagaagtggcaacttgagttcctcaaacaacctgatgacttttacttcaatcggctgaaagatgagattttgaaatccagactcgtgatcagagacttggtcaatgctgaccatgttgatgaaatatcaattgttgataatgccaccactgctacagccattgtgttgcagagtgttgcttgggaatttttgcaagggaagtttaacaaaggtgatgctgttgtcatgcttcaatatgcttatggtgctgtgaaaaaatctctggaagcatatgttacgcgtgcaggtgggtatgttattgaagcttggtttctatttcctgttaattctgatggtgagattgtcagtgagtttcggaaagctttagaaagagggaaagccaatggtaggaaagtcagattggctatgattgatcatgtgacgtctattcctagtgttccgattccggttaaagaattgatcaagatttgtcgggaagagggtgtcgataaagtatttgttgatggtgcacaggggattgggtgtgttgatgttgacatgaaagaaattggggctgatttttacactggtactttgaacaagtgggttttttgcccgcctggggcagcgtttttgtattgtaggaaatcaaatgaaattgatgatttgcatcaccctgtggtgtctcatgagtatggaaatgggttggctatcgagagtgcttggattggaactagggattatagtgcccaactggtggttcctcaagctttggagtttgttaacagatttgaagggggaattgaaggaatcaagaagaggaatcataaagctgttgttgagatgggggagatgttggcaaaagcatggggaacccatcttgggtctcctccggagatgtgttcaagcatgatcatggttggcttgcctgctattttgggtatttctagtgattccattgctttaaagttgagaacccacttgaggaataatttttctgttgaagtacctatctattatagggtaccgggtgatggagtggttaacccagttacaggatacgctcgaatttctcatcatgtttacaacaagccagatgaatactacaagttcagagatgcagttaatcaacttgttaatgataagttcacttgtgcacttctcgcatggtaa

SEQ ID NO: 216 - protein, 444 aa, Citrus sinensis
MDTIGADTKISNTYLPEKPELSPTLISDTELLSEFSHHVQNIARINNGSFGCCPKSVISAQQKWQLEFLKQPDDFYFNRLKDEILKSRLVIRDLVNADHVDEISIVDNATTATAIVLQSVAWEFLQGKFNKGDAVVMLQYAYGAVKKSLEAYVTRAGGYVIEAWFLFPVNSDGEIVSEFRKALERGKANGRKVRLAMIDHVTSIPSVPIPVKELIKICREEGVDKVFVDGAQGIGCVDVDMKEIGADFYTGTLNKWVFCPPGAAFLYCRKSNEIDDLHHPVVSHEYGNGLAIESAWIGTRDYSAQLVVPQALEFVNRFEGGIEGIKKRNHKAVVEMGEMLAKAWGTHLGSPPEMCSSMIMVGLPAILGISSDSIALKLRTHLRNNFSVEVPIYYRVPGDGVVNPVTGYARISHHVYNKPDEYYKFRDAVNQLVNDKFTCALLAW

SEQ ID NO: 217 - DNA, 864 bp, Gossypium hirsutum
atgcagcacgatgaccctagaaacggtgagtcgactcaccgcagctccaagaaacccaaaatttcatctcagttcattactgagtcggatatccgagacgagttctctcaccaccacccacgtgtcgcacgcatcaacaacgggagtttcggtagctgtcccggttcggttcttgctgcccaacgccattggcagctacagttcctccgtcaacctgatgccttttactttaattcccttcgtgacggaataacggcttcgcggaaaattataaaggacctcatcaacgccgaccacgtcgacgaggtctccctcgtcgataacgccacaaccgctgcggccatcgtgctccaacggatcggccgcagtttcgccgaagggaagttccagaaaaatgacactgttttgatgctccactgcgcgtatgaagccgttaaaaaatcaatccaagcgtacgtcacccgggccggcggctcggtcattgaggtacggcttccattcccggtaaattcagaggaggaaatcatatccgaactcaaaaaatcgatcgacgaaggaaaattcaacggtagaaggataaggttagcgattatcgatcatattacatcaatgccatcggttgttattccgttaaaagagttagttaggatttgtagagcggaaggaatagagcaggttttcgtagacgcggctcacgctattgggagcgtgaaagtggatgtcaaagaagttggagccgatttttatgttagcaatttacataaatggttcttttgcccgccttctgtggcatttttatactgtaataaatcgactacatcgtctgatttgcatcaccctgttattgtctcgtcctctgcctga

SEQ ID NO: 218 - protein, 287 aa, Gossypium hirsutum
MQHDDPRNGESTHRSSKKPKISSQFITESDIRDEFSHHHPRVARINNGSFGSCPGSVLAAQRHWQLQFLRQPDAFYFNSLRDGITASRKIIKDLINADHVDEVSLVDNATTAAAIVLQRIGRSFAEGKFQKNDTVLMLHCAYEAVKKSIQAYVTRAGGSVIEVRLPFPVNSEEEIISELKKSIDEGKFNGRRIRLAIIDHITSMPSVVIPLKELVRICRAEGIEQVFVDAAHAIGSVKVDVKEVGADFYVSNLHKWFFCPPSVAFLYCNKSTTSSDLHHPVIVSSSA

SEQ ID NO: 219 - DNA, 1347 bp, Glycine max
atggaaaacgacaacaccacccacctaaacggcaccggcaagaaacccaagctcgcgcacgtcacgcacaccatttccgaggccgagatccgcgaggaattctcccaccaccaccgcggcgtcgccagaatcaacaatggcagctttggcagctgcccgcattccgtcctcgccgcgcagtccacctggcagctccgcttcctccagcagcccgacgacttctacttcaacgcgctccgccccggtatcctcgcctcacgcgccgccatccaagacctcatcaatgccggccacgtggacgacgtctccctcgttgacaacgccaccaccgccgccgccgtcgtcctccagcagatcggccgccgcttcgtccgcggctacttccaccggaacgacgccgttgtgatgttccactgcgcctaccaggccgtgaagaaatccattgaagcttacgtcagtcccatcggcggcaccatcgtcgaggttgaactcccctttccggtgcgctcggaggaagaaatcataacggagttcaagaaaggcctcgagaaaggtaaactcaacggcggaagagttaggttagcgataatcgatcacataacttccatgccttcgttcgttctccccgttcgcgaattgatcagggtttgcagagagcacggagtggagcaggttttcgtcgacggcgctcacgccattggaagcgtccccgtggacgttaaggaaattggagctgatttttacgtgagcaatttgtacaagtggtttttctcgccgccttcggtggcgtttttgtattgtaaggaaaaatcaaacgacgtgcaccaccctgtcgtttcacaggagtacgggaagggcctaccggttgagagtgcgtgggtggggatgcgtgactatagcccccagcttgttgtgccatcgattttggagttcgtgaatcggtttgagggtgggattgaggggattatgaagaggaaccatgacggggttgtgaaaatgggaaccatgttggcggagtcgtggggaacggttctggggtcgcctcctgatatgtgtgctagcatgattatggtggggttgccttctaggttgcgtgtgatgagtgttgatgatgcattgaggttaaggtcgtaccttagggtttatcatgcagttgaagttcctgtgtattaccaggctttgaggaatggtgatagggatcctagggacaaggatgggtttataactggttacgtaaggatatctcatcaagtttataatactgctgatgattatgagaggcttaagactgcgatcaatcagcttgtggaggacgggaaagtttgcagcgggcttcctaaggagtga

SEQ ID NO: 220 - protein, 448 aa, Glycine max
MENDNTTHLNGTGKKPKLAHVTHTISEAEIREEFSHHHRGVARINNGSFGSCPHSVLAAQSTWQLRFLQQPDDFYFNALRPGILASRAAIQDLINAGHVDDVSLVDNATTAAAVVLQQIGRRFVRGYFHRNDAVVMFHCAYQAVKKSIEAYVSPIGGTIVEVELPFPVRSEEEIITEFKKGLEKGKLNGGRVRLAIIDHITSMPSFVLPVRELIRVCREHGVEQVFVDGAHAIGSVPVDVKEIGADFYVSNLYKWFFSPPSVAFLYCKEKSNDVHHPVVSQEYGKGLPVESAWVGMRDYSPQLVVPSILEFVNRFEGGIEGIMKRNHDGVVKMGTMLAESWGTVLGSPPDMCASMIMVGLPSRLRVMSVDDALRLRSYLRVYHAVEVPVYYQALRNGDRDPRDKDGFITGYVRISHQVYNTADDYERLKTAINQLVEDGKVCSGLPKE

SEQ ID NO: 221 - DNA, 1356 bp, Glycine max
atgtcttccaccaccattcacgaaaacaaccaccacaacggctcccacatacccaaaaaacccaaactctcttccaccttcataactccgtcggaaatcgaatccgaattcggccaccacgacgctgccgtcgcgcgcatcaacaacggcagcttcgggtgctgcccggcctccatcctcgccgcgcagcgccgctggcagctccagtacctccgccaacccgaccacttctacttcaacgatctccaatccggcatcctccaatcccgaaccctaatcaaggacctcgtcaacgccgaccacgtcaatgagatctccatcgtcgacaacgccaccaccgccgccgccatcgtcctccaacacaccgcctggaacttccgcgaagggaagttccaaaaaggcgacgtcgtcctcatgctccactacgcctacggcgccgttaagaaatccatggaagcctacgtcacgcgcgccggaggtaacgtcgttgaggtcccgttacctttccccgttaattccaacgacgagatcgtttccgagtttagaaaagctttggagagaggaaagagtaacggaaatagggttaggttagcggtgatagatcacgtgacttccatgccatgtgttgttattcccgttaaagagttgattcagatttgcagggaggaaggggtagatcaggtttttgtcgacgctgcacattccattgggtgcactgatgttgatatgaaggagattggtgctgatttttatactagtaatttgcacaagtggttcttttgtccaccttcaattgcgtttttgtacactcgtaggaaccttaagggtactgatcctggttctgatttgcatcaccctgtggtgtctcatgagtatggaaatggtttggctgtggagagtgcttggattgggaccagggattatagtgctcagttggtggttccggccgcggtggagtttgttaaccggtttgaaggagggattgaggggatcaagaagaggaatcatgaggctgttgtggagatgggggagatgctggcgaaggcgtgggggactcggctagggagtcccccgcatatgtgtgctagcatggttatggttggcttgccggcttgtttgggaattgggagtgattctgatgccctcaagttgaggacacatttgagggatgcttttggcgttgaggttccaatatactatagatcgccgagagagggagaagttggggtggttactggatatgcgaggatttctcatcaggtgtataacaaggttgatgactattacaagtttagggatgcggttaaccagcttgtgcaaaatgggttcacttgtgttgttctttcgtcggattga

SEQ ID NO: 222 - protein, 451 aa, Glycine max
MSSTTIHENNHHNGSHIPKKPKLSSTFITPSEIESEFGHHDAAVARINNGSFGCCPASILAAQRRWQLQYLRQPDHFYFNDLQSGILQSRTLIKDLVNADHVNEISIVDNATTAAAIVLQHTAWNFREGKFQKGDVVLMLHYAYGAVKKSMEAYVTRAGGNVVEVPLPFPVNSNDEIVSEFRKALERGKSNGNRVRLAVIDHVTSMPCVVIPVKELIQICREEGVDQVFVDAAHSIGCTDVDMKEIGADFYTSNLHKWFFCPPSIAFLYTRRNLKGTDPGSDLHHPVVSHEYGNGLAVESAWIGTRDYSAQLVVPAAVEFVNRFEGGIEGIKKRNHEAVVEMGEMLAKAWGTRLGSPPHMCASMVMVGLPACLGIGSDSDALKLRTHLRDAFGVEVPIYYRSPREGEVGVVTGYARISHQVYNKVDDYYKFRDAVNQLVQNGFTCVVLSSD

SEQ ID NO: 223 - DNA, 1362 bp, Glycine max
atggtgaaatccctgttcctgatttctcgaatcccaatgtcttccaccaccatccaccacaacggctcccacatacccaaaaaacccaaactctcttccttggaaatcgaatcagaattcggccaccacgactcctccgtcgcccgcatcaacaacggcagcttcgggtgctgcccggcctccatcctctccgctcaacgccgctggcagctccagtacctccgccagcccgaccacttctacttcaacgacctcaaatccgccgtcctccaatcccgaaccttaatcaaggacctcgtcaacgccgaccacgtcgacgagatctccattgttgacaacgccaccaccgccgccgccatcgtcctccagcacaccgcctggaacttccgcgaaggaaagttccagaagggtgacgtcgtcctcatgctccactacgcctacggcgccgttaagaaatccatggaagcctacgtcacgcgcgccggaggtaacgtcgtcgaggtcccgttacctttccccgttaattccaacgatgagatcgtttccgagtttaggaaagcgttagagagaggaaagagtaatgggaatagggttaggttagcggtaattgatcatgtgacttccatgccgtgtgttgttattcccgttaaagagttgattcagatttgcagggaggaaggtgtggaccaggtttttgttgacgctgcacattccattgggtgtactgatgttgatatgaaggagattggtgctgatttttatactagtaatttgcataagtggttcttttgtccaccttctattgcgtttttgtacactcgtaggaactttaaaggtactggttctggttctgatttgcatcaccctgtggtgtctcatgagtatggcaatggtttggctgtggagagtgcttggattgggactagggattatagtgctcagttggtggttccggccgcagtggagtttgttaaccggtttgaaggagggattgaggggatcaagaagaggaatcatgaggctgttgtggagatgggggagatgctggtgaaggcgtgggggactcggcttgggagtcccccacatatgtgtgctagcatggttatggttggcttgcctgcttgtttggggattgagagtgattctgatgccctaaagttgaggacacatttcagggatacttttggggttgaggttccgatatactatcggcccccaaaagaaggggaagttggggtggttactggatatgccaggatttctcatcaagtgtataacaaggttgatgactattacaagttcagggatgcagttaaccagcttgtgcaaaatgggttcacttgtgctgttctttcggattga

SEQ ID NO: 224 - protein, 453 aa, Glycine max
MVKSLFLISRIPMSSTTIHHNGSHIPKKPKLSSLEIESEFGHHDSSVARINNGSFGCCPASILSAQRRWQLQYLRQPDHFYFNDLKSAVLQSRTLIKDLVNADHVDEISIVDNATTAAAIVLQHTAWNFREGKFQKGDVVLMLHYAYGAVKKSMEAYVTRAGGNVVEVPLPFPVNSNDEIVSEFRKALERGKSNGNRVRLAVIDHVTSMPCVVIPVKELIQICREEGVDQVFVDAAHSIGCTDVDMKEIGADFYTSNLHKWFFCPPSIAFLYTRRNFKGTGSGSDLHHPVVSHEYGNGLAVESAWIGTRDYSAQLVVPAAVEFVNRFEGGIEGIKKRNHEAVVEMGEMLVKAWGTRLGSPPHMCASMVMVGLPACLGIESDSDALKLRTHFRDTFGVEVPIYYRPPKEGEVGVVTGYARISHQVYNKVDDYYKFRDAVNQLVQNGFTCAVLSD

SEQ ID NO: 225 - DNA, 1341 bp, Glycine max
atggcctccaacggcgacgccgttcatccccacccttccaaaaagatcaaactcttcagcaattccattaactcaactaattcctcgtttatcacccatgccgagatcgaatcggaattctcccaccaccaccccacggtggcgcgcctcaacaacggcgccttcgggtgctgcccggcttccgtgatcgccgtgcagcgcgagtggcagatgaagaacctccggcaaccggaccacttctacttcaacgacctcaagaagggactccttcactcccgcaccatcatcaagaacctcgtcaacgccgaacacgtggacgagatctccctcgtcgacaacgcctccaccgccaccgccatcgtcctccagcaagccgcctgggccttccaggaagcaaaattccagaaaggcgacgtggtcctcgtgctccactacgcctacggcgccgtcaagaaagccatcgaggcctacgtggtgcgcgccggaggcaccgttatcgaagtccccctccccttccccgtcacctccaacgacgacgtagtcaacgaattccgaaaagcccttgagaggggcaagtcccgaggcaacagaattcgcttagcggttatcgaccacgtgacttccatgcccagcgtggtcatccccgttaaggacttggttaaaatctgcagagaggagggtgtggagcaggtattcgtggacgcggcacactcgattgggtgcacgcgcgtggacatgcaggagatcggagcggacttctacaccagcaacttgcacaagtggttcttctgccctccctccgtggcgttcctctacgcacgtgcctcctctaaggcacgtgacctgcaccatcccgtggtgtcgcacgagtacgggaaggggttggccgtggagagctcgtggaccgggaacagggactacagcgcgcagctggtggttccggcggttatggagttcgtgaaaaggttcgagggtgggattgaagggatcagaaagaggaaccatgatttggttgttgagatgggggagatgctggtggaggcttgggggacccaccttgggagtccttcgcatatgagtgctagcatggtgatggtgggtttgcctccttctttgggtattgggagtgactctgatgctcaaaagcttaggacccgtttgagggatgaatttgatgttgaagtaccaatttattttcgtggtggggaagatggctctgttactgcgtatgcacgaatttctcgtcaggtttacaacaaggttgaggactattataagttcaggaatgcggttaatcaacttgtgcaagatgggtttacttgtgctcttctttcggcttga

SEQ ID NO: 226 - protein, 446 aa, Glycine max
MASNGDAVHPHPSKKIKLFSNSINSTNSSFITHAEIESEFSHHHPTVARLNNGAFGCCPASVIAVQREWQMKNLRQPDHFYFNDLKKGLLHSRTIIKNLVNAEHVDEISLVDNASTATAIVLQQAAWAFQEAKFQKGDVVLVLHYAYGAVKKAIEAYVVRAGGTVIEVPLPFPVTSNDDVVNEFRKALERGKSRGNRIRLAVIDHVTSMPSVVIPVKDLVKICREEGVEQVFVDAAHSIGCTRVDMQEIGADFYTSNLHKWFFCPPSVAFLYARASSKARDLHHPVVSHEYGKGLAVESSWTGNRDYSAQLVVPAVMEFVKRFEGGIEGIRKRNHDLVVEMGEMLVEAWGTHLGSPSHMSASMVMVGLPPSLGIGSDSDAQKLRTRLRDEFDVEVPIYFRGGEDGSVTAYARISRQVYNKVEDYYKFRNAVNQLVQDGFTCALLSA

SEQ ID NO: 227 - DNA, 1407 bp, Hordeum vulgare
atggcgtcgatcccgtctgatgaggtctccaagaacggtcacggcaacggaaacggcccatcgccgccgcgcgcgaagcgccctcgcgcagcgttcatctcggccgcccagatccgcgacgagttcgcgcaccacgaccccgcagttgcccgcgtcaacaacggcagcttcggctgctgcccggcctccgtgctcgaagcgcaggcccgctggcagcgcctcttcctcgctcagcccgacgccttctacttcgacggccttcagccggggctccgccgttcccgcgcagccgtcgcggcccttgtcaacgctggggacgtgtccgagatttccctcgtagacaacgctaccaccgctgctgcaatcgtgctgcagcatgccgcctggagctttgccgaggggcacttcgctcggggcgacgctgtgctcatgctccattacgcctatggagcagtcaagaaatctatccaggcctacgttgctcgcgcgggcgccactgtcgtcgaggtacccctcccgttccccgtcacctcccctcacgccattattgccgagttccatgctgcgctcgctgttgccaaggccggtggtcgtaaggtccggcttgctgtcattgaccacatcacctccatgcccagtgttctcattccagtcaaggagctagttgccatttgccgccaagagggcgtcgacaaagtttttgttgatgctgcacactctgttgggcaagtccctgtcgatgtgcgagacattggggcggatttctatactagcaacctccacaagtggttcttttgccccccagccgtggctttcttacacacccgcaagggtggcccaatagcttctcagctccaccaccctgtcgtgtcacatgaatatggcaatgggctacctatggagagtggatggattgggacacgggattacagtgcccagatagtcgttcctgaagctattgactttgtgaaccggtttgaaggtgggattgaggggatacgcagccggaaccatgagaaggtggtcgagatggggaggatgcttgccgaagcatgggggacatttcttggatcaccaccagtaatgtgcggaagcatggttatggtagggatgcctagttgtctttgcattgagagtgatgatgatgcactgagagtgcggaccatgttgaggaaggatttcaaagttgaggtgcctatatactacaataccagacaggttgaagtgcaagagatagcaaaggataataatagtgatccagtgacggggtatgtaagaatctcacaccaggtttacaatgtcaaggaagagtatgagaggctgagagatgctgtcaataagcttgttgctgaggggttcaccagcgccgaattgaggccagctgagaagcaagaaactctggcttga

SEQ ID NO: 228 - protein, 468 aa, Hordeum vulgare
MASIPSDEVSKNGHGNGNGPSPPRAKRPRAAFISAAQIRDEFAHHDPAVARVNNGSFGCCPASVLEAQARWQRLFLAQPDAFYFDGLQPGLRRSRAAVAALVNAGDVSEISLVDNATTAAAIVLQHAAWSFAEGHFARGDAVLMLHYAYGAVKKSIQAYVARAGATVVEVPLPFPVTSPHAIIAEFHAALAVAKAGGRKVRLAVIDHITSMPSVLIPVKELVAICRQEGVDKVFVDAAHSVGQVPVDVRDIGADFYTSNLHKWFFCPPAVAFLHTRKGGPIASQLHHPVVSHEYGNGLPMESGWIGTRDYSAQIVVPEAIDFVNRFEGGIEGIRSRNHEKVVEMGRMLAEAWGTFLGSPPVMCGSMVMVGMPSCLCIESDDDALRVRTMLRKDFKVEVPIYYNTRQVEVQEIAKDNNSDPVTGYVRISHQVYNVKEEYERLRDAVNKLVAEGFTSAELRPAEKQETLA

SEQ ID NO: 229 - DNA, 1353 bp, Medicago truncatula
atggataaccacgacgatcctcgaaacggcaccgttcagccagactcaaagaaaccaaaacttacccaccccatttcctcacacgaacttcttcacgaattctcccaccaccaaaccgccgtcgcacgtatcaacaacggcagcttcggcagctgtccccgctccatcctcaccgcccaaaccacctggcagcttcgcttccttcaacaacccgacgatttcttcttcaacaccctccgtaacggaattctcgattctcgcaaaatcatcaaaaacctaatcaatgctgacgacgttgaagaaatttcgttaatcgataatgctaccaccgctgccgctatcgttcttcaacaaatcggccatcacttctcctccggtaagttctgccgaaatgacactgttataattttccattgcgcttatcaagctgttaagaaatcaattgaagcttatgttatacccgttggtggctctgttattgaggttgaattaccttttccggttaattccaacgaggaaattatcgcggaatttaagaaagggattgaacgagggaaaattaacggtggtagagttaggttagcgataatcgatcacattacgtcgatgccttcggttgttattccggttagggaattgattcgggtttgtagagagaatgaagtggatcaggtttttgttgatggtgctcatgctttaggaagtatggaggttgatgttaaagaaattggtgctgatttttatgttagtaatttgtataaatggtttttttcgccaccttcggttgcgtttatgtattgtaataagaataagaaattgaatgatgttcatcatccagtggtggcgcatgagtatggtaatggtttgcctgctgaaagtgcttgggttgggatgagagattatagtcctcagcttgtggtgccttcgattatggagtttgtgaatcggtttgaaggtggaattgaagggattatgaagaggaaccataatatggttgtgaaaatgggggttatgttgaaggaagcgtggggtacgaatcttgggtcgccgcctgaaatgtgtgcaagtatgattatgattggcttgccttcgaagattcgggtgatgagtgatgatgatgctttgagattaaggttttatcttagggtttatcatgctatagaagttcctgtgtattatcaggctttgggaaatggtgaaagggatgctagagataaagacgggtttataactggttatgtgaggatttctcatcaggtgtataacattgttgatgattataataggcttaagactgcaattattcagcttttgcaagatggaaaaatttgcagtgaacttcctaaagagtga

SEQ ID NO: 230 - protein, 450 aa, Medicago truncatula
MDNHDDPRNGTVQPDSKKPKLTHPISSHELLHEFSHHQTAVARINNGSFGSCPRSILTAQTTWQLRFLQQPDDFFFNTLRNGILDSRKIIKNLINADDVEEISLIDNATTAAAIVLQQIGHHFSSGKFCRNDTVIIFHCAYQAVKKSIEAYVIPVGGSVIEVELPFPVNSNEEIIAEFKKGIERGKINGGRVRLAIIDHITSMPSVVIPVRELIRVCRENEVDQVFVDGAHALGSMEVDVKEIGADFYVSNLYKWFFSPPSVAFMYCNKNKKLNDVHHPVVAHEYGNGLPAESAWVGMRDYSPQLVVPSIMEFVNRFEGGIEGIMKRNHNMVVKMGVMLKEAWGTNLGSPPEMCASMIMIGLPSKIRVMSDDDALRLRFYLRVYHAIEVPVYYQALGNGERDARDKDGFITGYVRISHQVYNIVDDYNRLKTAIIQLLQDGKICSELPKE

SEQ ID NO: 231 - DNA, 1368 bp, Medicago truncatula
atggcctctgagaaaaacaatcaccaccgttcaatcccagacatcaacggcacacaccccacccccaaaaaacctaaactctcttcttcttccaatttcatcaccgcttcagaaattcaatctgaattcagccaccacgactccgccgtctctcgcatcaacaacggcagcttcggctcctgtccttcctccatcctctccgctcaacaacaatggcagctcaagtatcttcgtcaacccgatcacttctacttcaaccacctcaaacccgccatcaacaactcccgctccattatccaaaacctagtcaacgctaaagacatcaacgaaatctctatcgtcgataacgccaccaccgccgccgctatcgttcttcaacacaccgcttggtgtttccgtgaaggtaaattcaacaaaggtgacgtcgttgttatgcttcattatgcttacggtgctgttaagaaatccatggaggcttacgtcactcgtgctggtgggaaagtgattgaagttccgttaccttttcctgtgagttccaatgatgagattgtgactgagtttagaaaagctttggaaaaagggaaagttgatgggaagaaaattaggttagctgtgattgatcatgttacttctatgccttgtgttgtgattcctgtgaaggaattgattcagatttgtagagaggaaggtgttgaacaggtttttgttgatgctgctcattcaattggctgtactgatgttgatatgcaagatattggtgctgatttttataccagtaatttgcataagtggttcttctgtccaccttcgatcgcttttttgtatactaaaaagaatcctaaaactggtggtggtggtgatttgcatcatcctgttgtgtctcatgagtatggaaatggattagctgtggaaagtgcttggattggcacaagggattatagtgctcaattggtggttcctgaagctttggaatttgtcaataggtttgaaggtgggattgaagggattaagaagaggaatcatgaagctgttattgagatgggagagatgttggtgaaagcttggggaactcatcttggaagtccgaaacatatgtgtgctagtatggttatggttggtttgcctacttgttttggggttagaagtgattctgatgcacttacgctgaggacacatttgagggatgtttttggagttgaagttcctatatattatagaccgcctagagatggagaagttgatcctgtgacggggtatgcaaggatttcttatcaggtttacaataaggttgaggactattacaagtttcgggatgctgttaaccaactggtggataatgggtttgcttgtactcttctttcaaaatga

SEQ ID NO: 232 - protein, 455 aa, Medicago truncatula
MASEKNNHHRSIPDINGTHPTPKKPKLSSSSNFITASEIQSEFSHHDSAVSRINNGSFGSCPSSILSAQQQWQLKYLRQPDHFYFNHLKPAINNSRSIIQNLVNAKDINEISIVDNATTAAAIVLQHTAWCFREGKFNKGDVVVMLHYAYGAVKKSMEAYVTRAGGKVIEVPLPFPVSSNDEIVTEFRKALEKGKVDGKKIRLAVIDHVTSMPCVVIPVKELIQICREEGVEQVFVDAAHSIGCTDVDMQDIGADFYTSNLHKWFFCPPSIAFLYTKKNPKTGGGGDLHHPVVSHEYGNGLAVESAWIGTRDYSAQLVVPEALEFVNRFEGGIEGIKKRNHEAVIEMGEMLVKAWGTHLGSPKHMCASMVMVGLPTCFGVRSDSDALTLRTHLRDVFGVEVPIYYRPPRDGEVDPVTGYARISYQVYNKVEDYYKFRDAVNQLVDNGFACTLLSK

SEQ ID NO: 233 - DNA, 1449 bp, Oryza sativa
atggcgtcgatcccgccggatgacgacgcggcggcggcggcggcggcgggggcggccgagaacgggtacgggaacgggaaggggaacggcaacgggccggcgccgcgcccgccgccggcgaagcggccgaggtcggtgatctcggcggcgcagatccgggcggagttcgagcaccacgaggccggggtggcgcgcgtcaacaacggcagcttcgggtgctgcccgtcctccctcctcgacgcgcaggcgcggtggcagcgcctcttcatcgcccagcccgacgacttctacttccacgccctccagccggggctccgccgctcgcgggctgccgtcgcgggcctcgtcaacgccggggacgtcgccgaggtctccctcgtcgacaacgccaccaccgccgccgccatcgtgctgcagcacgccgcgtggagcttcgccgaggggaggttctcccgcggggacgccgtgctcatgctccactacgcgtacggcgccgtcaagaagtccatccacgcctacgtcgcccgcgccggggccaccgtcgtcgaggtgccgctcccgttccccgtcgcgtccgcggacgccatcatcgccgagttccgcgccgcgctcgatgtggccaaggccggggggcgcaaggtccgcctcgcggtcatcgaccacatcacctccatgcctagcgttgtcatcccggtgaaggagctcgttgccatctgccgagaagagggtgtcgataaggtgtttatagatgccgcgcactccattgggcaggtccctgttgatgtgcgcgatattggggccgatttttacaccagcaatctccacaagtggttcttctgcccgcctgccgtggctttcttgcacacccgaaaggatgatccgatagcctcccagctccaccatcctgtggtgtcgcacgagtacggcaatgggcttcccatggagagtggatggattgggacaagggattacagtgcacagcttgtagtgcctgaatctattgattttgttaaccgatttgaaggtggcatcgagggaataaggagccgtaaccatgaaaaagtgatcgagatgggtaagatgcttgctgaggcatgggggacttttcttggcacaccaccagagctgtgcggtagcatggttatggttggtcttcccggttgccttggtgttgaaagtgatgatgatgtgatgagaatgagaacaatgttgaggaaggattttatggtggaggtgccaatatactacaattcgagaagagtagaagctcaagaaatggcaaaggataagaatggtgatgcagtcacagggtatgttaggatctcacaccaagtttacaatgtaacggaggattatgagaagctgagggatgctgtcaataagcttgttgctgatggattcaccagcagcaagttgcggccttcgcagaagcaggaaacgatggcctga

SEQ ID NO: 234 - protein, 482 aa, Oryza sativa
MASIPPDDDAAAAAAAGAAENGYGNGKGNGNGPAPRPPPAKRPRSVISAAQIRAEFEHHEAGVARVNNGSFGCCPSSLLDAQARWQRLFIAQPDDFYFHALQPGLRRSRAAVAGLVNAGDVAEVSLVDNATTAAAIVLQHAAWSFAEGRFSRGDAVLMLHYAYGAVKKSIHAYVARAGATVVEVPLPFPVASADAIIAEFRAALDVAKAGGRKVRLAVIDHITSMPSVVIPVKELVAICREEGVDKVFIDAAHSIGQVPVDVRDIGADFYTSNLHKWFFCPPAVAFLHTRKDDPIASQLHHPVVSHEYGNGLPMESGWIGTRDYSAQLVVPESIDFVNRFEGGIEGIRSRNHEKVIEMGKMLAEAWGTFLGTPPELCGSMVMVGLPGCLGVESDDDVMRMRTMLRKDFMVEVPIYYNSRRVEAQEMAKDKNGDAVTGYVRISHQVYNVTEDYEKLRDAVNKLVADGFTSSKLRPSQKQETMA

SEQ ID NO: 235 - DNA, 1440 bp, Oryza sativa
atggcctcgcttcagtccggcggcgacgcggccgcgaacggcgtcgacgccgacgtcgacggcgccgcgtccccgccctcggcgaagcggccccgcgcgggcgcgggcgcggcggcgatcacggacgccgaggtccgggccgagttcgcgcaccacgaccgcgccgtggcgcgcctgaacaacggcaccttcggctgctgcccggcgtcggtgctggcggcgcgggcgcggtggcagcgcctgttcctgtcgcagcccgacgcgttctacttccaccacctccagcccgggctcgcccgctcccgcgccgcggtcgccgcggccgtcggcgccggggacgcctccgaggtctccctcgtcgacaacgtcaccacggccgccgccatcatcatgcagcacgtcgcctggagcttcgccgagggggacttcgcgcgcggggacgtcgtgctcatgttcctctacacctactgctccatcaagaactccatccacgcgtacgtggcccgcgcgggcgccaccgtcgtcgaggtgcccctcccgttccccgtctcctccccggacgccatcgtcgccgagttccgcgcggcgctcgcggtggccagggacggcggtcgccgccgcgtccgcctcgccgtcatcgaccacatcaccgccatgcccaccgtcctcatcccggtcaaggagctcgtcgccatctgccgcgaggagggcgtcgacaaggtgttcgtcgacgcggcgcacgccgtggggcaggtccccgtcgacgtgcgcgacatcggcgccgacttctacgccagcaacctccacaagtggttcttctgcccctccgccgtcgccttcatccacacgcgcaaggacgaccccgtctcctccaagctccaccaccccgtcgtctccagcgagtacggcaacggcctccccatggagagcgcctggatcggggtgcgcgactacagcgcgcagctcgtggtcccggacgtcgtcgacttcgtcaatcgcttcgacggcggcgtggaggggatacgccgccggaaccacgacaaggtggtcgagatgggcacgatgctcgccgccgcgtggggcacgttcctcggcacgccgccggagatgtgcgggagcatgctcatggtggggctgcccggctcgctgggcgtcgggagcgaggacgacgccgtcggcctgaggacgatgctgaggaagcagttcaaggtggaggtgccgctctactacaactccaaggcggcggcggcggatgcgccgccggagatggtcaaggacggcaatggcgatccggtgacggggtacgtgaggatctcgcaccaggtgtacaacgtccgggaggaatacgaggcgctcagggacgcggtcgccaagctcgtcgccgacggcttcacctgcagaaagttacggcctcctgagaaggaagaaactctggcatga

SEQ ID NO: 236 - protein, 479 aa, Oryza sativa
MASLQSGGDAAANGVDADVDGAASPPSAKRPRAGAGAAAITDAEVRAEFAHHDRAVARLNNGTFGCCPASVLAARARWQRLFLSQPDAFYFHHLQPGLARSRAAVAAAVGAGDASEVSLVDNVTTAAAIIMQHVAWSFAEGDFARGDVVLMFLYTYCSIKNSIHAYVARAGATVVEVPLPFPVSSPDAIVAEFRAALAVARDGGRRRVRLAVIDHITAMPTVLIPVKELVAICREEGVDKVFVDAAHAVGQVPVDVRDIGADFYASNLHKWFFCPSAVAFIHTRKDDPVSSKLHHPVVSSEYGNGLPMESAWIGVRDYSAQLVVPDVVDFVNRFDGGVEGIRRRNHDKVVEMGTMLAAAWGTFLGTPPEMCGSMLMVGLPGSLGVGSEDDAVGLRTMLRKQFKVEVPLYYNSKAAAADAPPEMVKDGNGDPVTGYVRISHQVYNVREEYEALRDAVAKLVADGFTCRKLRPPEKEETLA

SEQ ID NO: 237 - DNA, 1566 bp, Physcomitrella patens
atgcaaatcaagaggggaattattgaagcagttgatgaaggcggtgggtctcaaccactagcagaacccgcgcatcatgaagcaggaaaagctgaggaggatgatgaagcgggatatggagagggtaagcgtccacccggcgagctttgtaacggagaatctttgtctccatcaagagtttgccagggcaattccgcccttctaattgcagagcttctctccgcaggaaaagctggaattccgggaaaattgctcgatacggcggaagatgatgatgctgaatcgaaaagagtagtggacaggaagaatttgagcatttcaattgaggaggaattttcacatcacaagccagggttagcaagattgaacaatggcagcttcggaagctgtccacaatctgtgttagctgcacaagagaattgctctcgttgttggttacgccagcctgataaaagctactttggtcctttggaggaggggttgtatcgcgcgaggaaagaggttgctgaccttgtcaatgcacctgttgaagaagtatttcttctggaaaatgtaaccgcagctgcttccatggtggcattggatgtcatgtgggctttcgctgaaggtcgttataagaagggagactcaatattgatgttgaatttcacatacggagctttgaagaagtcttttcaagcttatgctgcaagagctgggggaagaatctttcaagttcagattccctttccagtgtcatccgaggagcagattttgcaagtcttcgaagaagcattggaggaggagagagaggagaatccatcaagcataattcgcatggcggtcttcgaccacatcgtctccatgcccacaatgatactcccaatacggcaacttataaagctctgtcgcagctatggtgtagagaacattttcattgatggagcacacggcattggaaaccttgaattgaacctgacagaacttgacgctgattattacacgagcaacctgcacaagtggatgtttgcacccaccaccgctgcttttgttcattgcaaagcgaagcaccttggtcggctgcatcacccgattgtctcacatttgtatggtgttggaattgcggctgaatgctcgtggttaggcacccgggattacagccctcttctcgcagttccagcagcaattaagtttgtgattgacgtagctggtagtatcgagaactatagcaaatttaatcactgcaaggttgtagcaatggcggagatgctcgcgagttcgtggggtacattcttgggcacaccaccggagatgtgtgcggcgatggctatggttgctctgccccctgccttgaacatccattcgcaggtggatttattagctctgcgaaggcgtatccgagaagagtatcaggtggacgtgcatctgtactatgcaggaagtttagcgccagccaatattgacgatgcgtctcaaggaaggacgaggaccaccgcttacgtgcgtatatcccatcaaatttataacaacagtgacgagtatataaagctgagagatgttgtcaatgacattgcacgtaaaagttag

SEQ ID NO: 238 - protein, 521 aa, Physcomitrella patens
MQIKRGIIEAVDEGGGSQPLAEPAHHEAGKAEEDDEAGYGEGKRPPGELCNGESLSPSRVCQGNSALLIAELLSAGKAGIPGKLLDTAEDDDAESKRVVDRKNLSISIEEEFSHHKPGLARLNNGSFGSCPQSVLAAQENCSRCWLRQPDKSYFGPLEEGLYRARKEVADLVNAPVEEVFLLENVTAAASMVALDVMWAFAEGRYKKGDSILMLNFTYGALKKSFQAYAARAGGRIFQVQIPFPVSSEEQILQVFEEALEEEREENPSSIIRMAVFDHIVSMPTMILPIRQLIKLCRSYGVENIFIDGAHGIGNLELNLTELDADYYTSNLHKWMFAPTTAAFVHCKAKHLGRLHHPIVSHLYGVGIAAECSWLGTRDYSPLLAVPAAIKFVIDVAGSIENYSKFNHCKVVAMAEMLASSWGTFLGTPPEMCAAMAMVALPPALNIHSQVDLLALRRRIREEYQVDVHLYYAGSLAPANIDDASQGRTRTTAYVRISHQIYNNSDEYIKLRDVVNDIARKS

SEQ ID NO: 239 - DNA, 1566 bp, Physcomitrella patens
atgcaaatcaagaggggaattattgaagcagttgatgaaggcggtgggtctcaaccactagcagaacccgcgcatcatgaagcaggaaaagctgaggaggatgatgaagcgggatatggagagggtaagcgtccacccggcgagctttgtaacggagaatctttgtctccatcaagagtttgccagggcaattccgcccttctaattgcagagcttctctccgcaggaaaagctggaattccgggaaaattgctcgatacggcggaagatgatgatgctgaatcgaaaagagtagtggacaggaagaatttgagcatttcaattgaggaggaattttcacatcacaagccagggttagcaagattgaacaatggcagcttcggaagctgtccacaatctgtgttagctgcacaagagaattgctctcgttgttggttacgccagcctgataaaagctactttggtcctttggaggaggggttgtatcgcgcgaggaaagaggttgctgaccttgtcaatgcacctgttgaagaagtatttcttctggaaaatgtaaccgcagctgcttccatggtggcattggatgtcatgtgggctttcgctgaaggtcgttataagaagggagactcaatattgatgttgaatttcacatacggagctttgaagaagtcttttcaagcttatgctgcaagagctgggggaagaatctttcaagttcagattccctttccagtgtcatccgaggagcagattttgcaagtcttcgaagaagcattggaggaggagagagaggagaatccatcaagcataattcgcatggcggtcttcgaccacatcgtctccatgcccacaatgatactcccaatacggcaacttataaagctctgtcgcagctatggtgtagagaacattttcattgatggagcacacggcattggaaaccttgaattgaacctgacagaacttgacgctgattattacacgagcaacctgcacaagtggatgtttgcacccaccaccgctgcttttgttcattgcaaagcgaagcaccttggtcggctgcatcacccgattgtctcacatttgtatggtgttggaattgcggctgaatgctcgtggttaggcacccgggattacagccctcttctcgcagttccagcagcaattaagtttgtgattgacgtagctggtagtatcgagaactatagcaaatttaatcactgcaaggttgtagcaatggcggagatgctcgcgagttcgtggggtacattcttgggcacaccaccggagatgtgtgcggcgatggctatggttgctctgccccctgccttgaacatccattcgcaggtggatttattagctctgcgaaggcgtatccgagaagagtatcaggtggacgtgcatctgtactatgcaggaagtttagcgccagccaatattgacgatgcgtctcaaggaaggacgaggaccaccgcttacgtgcgtatatcccatcaaatttataacaacaatgacgagtatataaagctgagagatgttgtcaatgacattgcacgtaaaagttag

SEQ ID NO: 240 - protein, 521 aa, Physcomitrella patens
MQIKRGIIEAVDEGGGSQPLAEPAHHEAGKAEEDDEAGYGEGKRPPGELCNGESLSPSRVCQGNSALLIAELLSAGKAGIPGKLLDTAEDDDAESKRVVDRKNLSISIEEEFSHHKPGLARLNNGSFGSCPQSVLAAQENCSRCWLRQPDKSYFGPLEEGLYRARKEVADLVNAPVEEVFLLENVTAAASMVALDVMWAFAEGRYKKGDSILMLNFTYGALKKSFQAYAARAGGRIFQVQIPFPVSSEEQILQVFEEALEEEREENPSSIIRMAVFDHIVSMPTMILPIRQLIKLCRSYGVENIFIDGAHGIGNLELNLTELDADYYTSNLHKWMFAPTTAAFVHCKAKHLGRLHHPIVSHLYGVGIAAECSWLGTRDYSPLLAVPAAIKFVIDVAGSIENYSKFNHCKVVAMAEMLASSWGTFLGTPPEMCAAMAMVALPPALNIHSQVDLLALRRRIREEYQVDVHLYYAGSLAPANIDDASQGRTRTTAYVRISHQIYNNNDEYIKLRDVVNDIARKS

SEQ ID NO: 241 - DNA, 1464 bp, Prunus persica
atgactgggaatgcaggatcatctacgcaagaaaaccactttcgacaacggctaagggtcatggccgagaagattgttatattttgccgttactacgttccacttattgttcttcttccttatcgaaccctccaattcttctaccaaatcaaaacccaagttcccattgagccaaaacactcttcttccttcatcacagactccgaaatccaatccgaatttgctcaccatgctcctggtgttgccatgatgaacaatggcagctttggttgctgccctgcttctgtcatctctgccttgcatcaatggcagctcaaaatgttccgccagccgagccatttcttattgaatgagctcaagaacaggatacttgaatcaagaaccataattaaagaccatatcaacgcagaagatgtggatgaagtctccattgtagacaacatctccactgctgctgccatagtcctgcagcaaacagcatgggcctttgctgaagggaaattcaacaaaggggatgctgtcattatgtttagctgcacttacggtgcggtgaagaactcaatcgaggcctacttttcacgtgctggtgggtccgttatcgaagttccatttaactttccattgaattccaatgaagaaatcataagtgaatttaggaaagcattggagagagaaaagggtaatggtaggagagtgagattggctgtgattgatcatgttacatgtgtgccaactgttgtaatgccagttaagcaattggttaaaatctgtagggatgaaggtgttgaacaagtgttcatagatgcagctcatgctgttgggagcgtagatgttgatatgcaagaaattggggcagatttttatgctagtactttgtataagtggttcttctgcccgcctgttgtttcatttctgtattgtaggaaatcagctacacattcagatttggaattgcatcaccctattgtgtctcataggtatggtaaggggttggctgaagaaagtttttgggttgggacaagggattatagtccatatctggtgcttccttcagttatggagttcgttaacaggttcgaaggcggtcttaagggaatcataaaaaggaatcatgatgctgttgttgagatggggaagatgttggcagaagcttggggaaccaatctaggttgtcctcctgatatgtgcgctagcatgatcatggtagggttaccggcttgtttggggatttcaagtgatgatgatgctacgaagttaaggccacatttatgtgataaatttggtgttgaagtcagaatacattatcaagctcccaaagatggagaggttggatcaacgacggggtatgttcgaatttgtcatcagatttacaacaaagttgatgactattacaagctcagagatgcagttaatcaactagttcgtgatggattcacttgcgctcttgagatcaatgaggcctga

SEQ ID NO: 242 - protein, 487 aa, Prunus persica
MTGNAGSSTQENHFRQRLRVMAEKIVIFCRYYVPLIVLLPYRTLQFFYQIKTQVPIEPKHSSSFITDSEIQSEFAHHAPGVAMMNNGSFGCCPASVISALHQWQLKMFRQPSHFLLNELKNRILESRTIIKDHINAEDVDEVSIVDNISTAAAIVLQQTAWAFAEGKFNKGDAVIMFSCTYGAVKNSIEAYFSRAGGSVIEVPFNFPLNSNEEIISEFRKALEREKGNGRRVRLAVIDHVTCVPTVVMPVKQLVKICRDEGVEQVFIDAAHAVGSVDVDMQEIGADFYASTLYKWFFCPPVVSFLYCRKSATHSDLELHHPIVSHRYGKGLAEESFWVGTRDYSPYLVLPSVMEFVNRFEGGLKGIIKRNHDAVVEMGKMLAEAWGTNLGCPPDMCASMIMVGLPACLGISSDDDATKLRPHLCDKFGVEVRIHYQAPKDGEVGSTTGYVRICHQIYNKVDDYYKLRDAVNQLVRDGFTCALEINEA

SEQ ID NO: 243 - DNA, 1356 bp, Populus trichocarpa
atggcttcctcctccttaaaacaccataaaagccactccctcaacggcttcaccacccccgccaagagaacaaaactttctttcatttctgactctgaaatccaatcagaattctcccaccatgaccaaaccatcgctcggatcaacaacggcagctttgggagctgccctcaatctgtcatctcagcccaacaaaacctccagctccagttcctccgccagccagataacttctacttcaacaccctcaaaccttctatacttcattcacgctccttaatcaaatctttggtaaacgctcattctgttgatgaaatctcccttgtagacaacgccaccaccgctgctgctattgtgttacaaaactgtgcatggggtttcaacgaaggaaggtttagcaagggagatgttgctgtcatgttgcattatgcttatggtgctgtcaagaagtctgttcaggcttatgtcacgcgcgctggaggggaagttattgaggtacacttgcccttccctgttgcatcaaaggaggagattgtgagtgaatttagaaaggccttagcgagagggaaagaaaatgggaagaagaaagtcaggttggctgtgattgatcatgttacttcgatgcctagtgttgttattcctgttaaagaattagttaaaatttgtagagaggaaggtgttgaccaggtttttgttgatgctgctcatggaattgggtgtgttgatgttgatgtgagagatattggggctgatttttatactagtaatttgcataagtggtttttttgccctccttctgttgcctttttgtattgcaggaagagaggagaggatggtaaagggggtgatctgcatcaccctgttgtgtctcatgagtatggtaatggattggctgtagagagtgcttggattgggactagggattatagtgctcagttggtggttccggcggttttggagttttttaataggtttgaaggtgggattgagggaattaagaagaggaatcatgagaaagttgtggagatgggggagatgctggtgaaagcttgggggactaatcttgggtctccaccggagatgtgtgggagtatgattatggttggattgcctgcttgtttggggatttcgaatgatctggatactttgaagttaaggtcacacttgagagagcatttccaggttgaagttcctatttattttagggctccagttgatggagaagttgattcaattactggctatgctcgcatttctcatcaagtttacaacaaggctgaggattattacaggtttagggatgcagttaaccaattggtcagtgatggcttcacttgtgcatctctctctaattga

SEQ ID NO: 244 - protein, 451 aa, Populus trichocarpa
MASSSLKHHKSHSLNGFTTPAKRTKLSFISDSEIQSEFSHHDQTIARINNGSFGSCPQSVISAQQNLQLQFLRQPDNFYFNTLKPSILHSRSLIKSLVNAHSVDEISLVDNATTAAAIVLQNCAWGFNEGRFSKGDVAVMLHYAYGAVKKSVQAYVTRAGGEVIEVHLPFPVASKEEIVSEFRKALARGKENGKKKVRLAVIDHVTSMPSVVIPVKELVKICREEGVDQVFVDAAHGIGCVDVDVRDIGADFYTSNLHKWFFCPPSVAFLYCRKRGEDGKGGDLHHPVVSHEYGNGLAVESAWIGTRDYSAQLVVPAVLEFFNRFEGGIEGIKKRNHEKVVEMGEMLVKAWGTNLGSPPEMCGSMIMVGLPACLGISNDLDTLKLRSHLREHFQVEVPIYFRAPVDGEVDSITGYARISHQVYNKAEDYYRFRDAVNQLVSDGFTCASLSN

SEQ ID NO: 245 - DNA, 1362 bp, Populus trichocarpa
atggaaggagccaaagaccctcgaaacggcggcgattcgtcgccaaagcaggtctccaaaaaacctcgcaccagtggccacataacagaacaggaaatccacgaagaattctctcaccataatcttaacgtagccagaattaacaacggtagcttcggtagctgccccggatctgtactcgctgctcaaaaaaactggcagcttcagttccttcaacaacccgacgacttctacttcaatactctccgaaaaggaattctccactcacgtactgtcataaaaaacctcatcaacgctgatgatgtcgatgaaatctccctcgtcgataacgccaccactgcggccgccatcgtccttcaacaaattggccgtgccttcgctgaaggtaagtttgctaaaaacgataccgttttaatgctccactgtgcttacgaagcggttaagaaatccattcaagcttacgtcacgcgtgccgggggttctgttattgaggttcagttaccgtttccggttaattcgaatgaggagataattgcggagtttaagagaggattaggaaaaggcaaagctaacggtagaaagattaggttagcgataattgatcatataacggcgatgccgtgtgttgttattccggttaaggagttggttaaaatttgtagagaagaaggcgtggagcaggtttttgttgatgcagctcatgctattggcagtgttgatataaatgttaaagaaatcggggctgatttttacgttagtaatctgcacaagtggtttttttgtccgccatcagtttcatttctgtattgcaagaaagcgagtttggaatttgatgtgcatcatccggttgtttcacatgagtacggaaatggattgccgattgagagtgcctgggttgggactagggattatagctcgcaattagtggtgccggcggctttggagtttgttaatcggtttgaggatggaattcatgggataatgaagaggaaccatgaggaggttgttaagatggggaaaatgttggcggaatcatggaggacaaatcttggttctccgccggagatgtgtgcaggaatgatcatggttggtttgccttcaagattgagtgtttcaagtgaagatgatgcttcgaggttaaggtcgcacttgcgtgactgtcatggggttgaggttccaatacactatcagggtttaagagatggtgaggagggggtgaaagataaggatggtgttataacagcatatgcaaggatttctcatcagatttataacaagtttgaggattattgcaggtttagggatgctgtaaatcatcttgctgagaatcgacagattcgcagaactatttctccagagtga

SEQ ID NO: 246 - protein, 453 aa, Populus trichocarpa
MEGAKDPRNGGDSSPKQVSKKPRTSGHITEQEIHEEFSHHNLNVARINNGSFGSCPGSVLAAQKNWQLQFLQQPDDFYFNTLRKGILHSRTVIKNLINADDVDEISLVDNATTAAAIVLQQIGRAFAEGKFAKNDTVLMLHCAYEAVKKSIQAYVTRAGGSVIEVQLPFPVNSNEEIIAEFKRGLGKGKANGRKIRLAIIDHITAMPCVVIPVKELVKICREEGVEQVFVDAAHAIGSVDINVKEIGADFYVSNLHKWFFCPPSVSFLYCKKASLEFDVHHPVVSHEYGNGLPIESAWVGTRDYSSQLVVPAALEFVNRFEDGIHGIMKRNHEEVVKMGKMLAESWRTNLGSPPEMCAGMIMVGLPSRLSVSSEDDASRLRSHLRDCHGVEVPIHYQGLRDGEEGVKDKDGVITAYARISHQIYNKFEDYCRFRDAVNHLAENRQIRRTISPE

SEQ ID NO: 247 - DNA, 1461 bp, Sorghum bicolor
atggcgtcggacccggcccctgacgacgcggccgcggcagagaacggccacggcaacgacaacggccacggcaacggcaacggcaacggcaacggcaacggcccgtccccgaagcgggcccggtcggtgatctcggcggacgagatccgcaccgagttcgcgcaccacgacgccgccgtggcgcgcgtcaacaacggcagcttcggctgctgcccggcctcggtcctcgccgcgcaggcccactggcagggcctcttcctcgcgcagcccgacgccttctacttccacggcctccagcagggcctcctccgctcgcgcgccgccgtcgccgaggcggtgggcgccggcgacgtctccgaggtctccctcgtcgacaacgccaccacggctgccgccatcgtcctgcagcacgcggcctggagcttcgccgagggccgcttcgcgagcggggatgccgtgctcatgctccactacgcctacggtgcggtcaagaagtccatccacgcctatgtcgcgcgcgcgggggccaccgtcgtcgaggtgcccctcccgttccctgtcgcgtcggccgacgcgattatcgccgagttccgtgctgcgctcgcggtcgccaaggaaggggggcgtagggtccggctcgcagtcatcgaccacatcacctccatgcccagtgtcgtcatccccgtgaaggagctcgtcgccatctgccgagaagagggcgttgacaaggtattcgttgacgctgcacattctattgggcaggtgcctgtggacgtgcgtgacattggagctgatttctacacaagcaaccttcataagtggttcttttgcccacctgccgtggcatttttgcatactcgcaaggacccgatagcttcccagctccatcaccctgttgtctcgcatgagtatgggaatgggctgcctatggagagcggatggattggaacgagggattacagtgcccagcttgttgtgtctgaggccatagattttgtgaatcggtttgagggtggaatcgaggggatacgaagccggaatcatgagaaagttattgagatgggtatgatgcttgctgaggcttggggcacttttcttggcacacctccggaactgtgtggtagcatggttatggtcgggatgcctggttgccttggtgtcgagagtgatgatgatgcattgagagtgagaactatgttgaggaaggatttccaggtggaggttccaatatactacaactcaagaagggtggaaggacaggagatggcaaaggataggaatggtgatccagtgacaggttatgtgaggatatcacaccaggtttacaatgtcaccaaggactatgagagactcagagatgctgtcaataaacttgtttctgaagggttcaccagcatcaacttgcggccttctgagaagccaggtatcatccacctgaaggcgctgtggccaactacttaa

SEQ ID NO: 248 - protein, 486 aa, Sorghum bicolor
MASDPAPDDAAAAENGHGNDNGHGNGNGNGNGNGPSPKRARSVISADEIRTEFAHHDAAVARVNNGSFGCCPASVLAAQAHWQGLFLAQPDAFYFHGLQQGLLRSRAAVAEAVGAGDVSEVSLVDNATTAAAIVLQHAAWSFAEGRFASGDAVLMLHYAYGAVKKSIHAYVARAGATVVEVPLPFPVASADAIIAEFRAALAVAKEGGRRVRLAVIDHITSMPSVVIPVKELVAICREEGVDKVFVDAAHSIGQVPVDVRDIGADFYTSNLHKWFFCPPAVAFLHTRKDPIASQLHHPVVSHEYGNGLPMESGWIGTRDYSAQLVVSEAIDFVNRFEGGIEGIRSRNHEKVIEMGMMLAEAWGTFLGTPPELCGSMVMVGMPGCLGVESDDDALRVRTMLRKDFQVEVPIYYNSRRVEGQEMAKDRNGDPVTGYVRISHQVYNVTKDYERLRDAVNKLVSEGFTSINLRPSEKPGIIHLKALWPTT

SEQ ID NO: 249 - DNA, 1434 bp, Sorghum bicolor
atggcgtcggacccggcccctgacgacgcggccgcggcagagaacggccacggcaacgacaacggccacggcaacggcaacggcaacggcaacggcaacggcccgtccccgaagcgggcccggtcggtgatctcggcggacgagatccgcaccgagttcgcgcaccacgacgccgccgtggcgcgcgtcaacaacggcagcttcggctgctgcccggcctcggtcctcgccgcgcaggcccactggcagggcctcttcctcgcgcagcccgacgccttctacttccacggcctccagcagggcctcctccgctcgcgcgccgccgtcgccgaggcggtgggcgccggcgacgtctccgaggtctccctcgtcgacaacgccaccacggctgccgccatcgtcctgcagcacgcggcctggagcttcgccgagggccgcttcgcgagcggggatgccgtgctcatgctccactacgcctacggtgcggtcaagaagtccatccacgcctatgtcgcgcgcgcgggggccaccgtcgtcgaggtgcccctcccgttccctgtcgcgtcggccgacgcgattatcgccgagttccgtgctgcgctcgcggtcgccaaggaaggggggcgtagggtccggctcgcagtcatcgaccacatcacctccatgcccagtgtcgtcatccccgtgaaggagctcgtcgccatctgccgagaagagggcgttgacaaggtattcgttgacgctgcacattctattgggcaggtgcctgtggacgtgcgtgacattggagctgatttctacacaagcaaccttcataagtggttcttttgcccacctgccgtggcatttttgcatactcgcaaggacccgatagcttcccagctccatcaccctgttgtctcgcatgagtatgggaatgggctgcctatggagagcggatggattggaacgagggattacagtgcccagcttgttgtgtctgaggccatagattttgtgaatcggtttgagggtggaatcgaggggatacgaagccggaatcatgagaaagttattgagatgggtatgatgcttgctgaggcttggggcacttttcttggcacacctccggaactgtgtggtagcatggttatggtcgggatgcctggttgccttggtgtcgagagtgatgatgatgcattgagagtgagaactatgttgaggaaggatttccaggtggaggttccaatatactacaactcaagaagggtggaaggacaggagatggcaaaggataggaatggtgatccagtgacaggttatgtgaggatatcacaccaggtttacaatgtcaccaaggactatgagagactcagagatgctgtcaataaacttgtttctgaagggttcaccagcatcaacttgcggccttctgagaaggtatcatccacctga

SEQ ID NO: 250 - protein, 477 aa, Sorghum bicolor
MASDPAPDDAAAAENGHGNDNGHGNGNGNGNGNGPSPKRARSVISADEIRTEFAHHDAAVARVNNGSFGCCPASVLAAQAHWQGLFLAQPDAFYFHGLQQGLLRSRAAVAEAVGAGDVSEVSLVDNATTAAAIVLQHAAWSFAEGRFASGDAVLMLHYAYGAVKKSIHAYVARAGATVVEVPLPFPVASADAIIAEFRAALAVAKEGGRRVRLAVIDHITSMPSVVIPVKELVAICREEGVDKVFVDAAHSIGQVPVDVRDIGADFYTSNLHKWFFCPPAVAFLHTRKDPIASQLHHPVVSHEYGNGLPMESGWIGTRDYSAQLVVSEAIDFVNRFEGGIEGIRSRNHEKVIEMGMMLAEAWGTFLGTPPELCGSMVMVGMPGCLGVESDDDALRVRTMLRKDFQVEVPIYYNSRRVEGQEMAKDRNGDPVTGYVRISHQVYNVTKDYERLRDAVNKLVSEGFTSINLRPSEKVSST

SEQ ID NO: 251 - DNA, 1431 bp, Sorghum bicolor
atggcgtcggacccggcccctgacgacgcggccgcggcagagaacggccacggcaacgacaacggccacggcaacggcaacggcaacggcaacggcaacggcccgtccccgaagcgggcccggtcggtgatctcggcggacgagatccgcaccgagttcgcgcaccacgacgccgccgtggcgcgcgtcaacaacggcagcttcggctgctgcccggcctcggtcctcgccgcgcaggcccactggcagggcctcttcctcgcgcagcccgacgccttctacttccacggcctccagcagggcctcctccgctcgcgcgccgccgtcgccgaggcggtgggcgccggcgacgtctccgaggtctccctcgtcgacaacgccaccacggctgccgccatcgtcctgcagcacgcggcctggagcttcgccgagggccgcttcgcgagcggggatgccgtgctcatgctccactacgcctacggtgcggtcaagaagtccatccacgcctatgtcgcgcgcgcgggggccaccgtcgtcgaggtgcccctcccgttccctgtcgcgtcggccgacgcgattatcgccgagttccgtgctgcgctcgcggtcgccaaggaaggggggcgtagggtccggctcgcagtcatcgaccacatcacctccatgcccagtgtcgtcatccccgtgaaggagctcgtcgccatctgccgagaagagggcgttgacaaggtattcgttgacgctgcacattctattgggcaggtgcctgtggacgtgcgtgacattggagctgatttctacacaagcaaccttcataagtggttcttttgcccacctgccgtggcatttttgcatactcgcaaggacccgatagcttcccagctccatcaccctgttgtctcgcatgagtatgggaatgggctgcctatggagagcggatggattggaacgagggattacagtgcccagcttgttgtgtctgaggccatagattttgtgaatcggtttgagggtggaatcgaggggatacgaagccggaatcatgagaaagttattgagatgggtatgatgcttgctgaggcttggggcacttttcttggcacacctccggaactgtgtggtagcatggttatggtcgggatgcctggttgccttggtgtcgagagtgatgatgatgcattgagagtgagaactatgttgaggaaggatttccaggtggaggttccaatatactacaactcaagaagggtggaaggacaggagatggcaaaggataggaatggtgatccagtgacaggttatgtgaggatatcacaccaggtttacaatgtcaccaaggactatgagagactcagagatgctgtcaataaacttgtttctgaagggttcaccagcatcaacttgcggccttctgagaagcaagaggcttag

SEQ ID NO: 252 - protein, 476 aa, Sorghum bicolor
MASDPAPDDAAAAENGHGNDNGHGNGNGNGNGNGPSPKRARSVISADEIRTEFAHHDAAVARVNNGSFGCCPASVLAAQAHWQGLFLAQPDAFYFHGLQQGLLRSRAAVAEAVGAGDVSEVSLVDNATTAAAIVLQHAAWSFAEGRFASGDAVLMLHYAYGAVKKSIHAYVARAGATVVEVPLPFPVASADAIIAEFRAALAVAKEGGRRVRLAVIDHITSMPSVVIPVKELVAICREEGVDKVFVDAAHSIGQVPVDVRDIGADFYTSNLHKWFFCPPAVAFLHTRKDPIASQLHHPVVSHEYGNGLPMESGWIGTRDYSAQLVVSEAIDFVNRFEGGIEGIRSRNHEKVIEMGMMLAEAWGTFLGTPPELCGSMVMVGMPGCLGVESDDDALRVRTMLRKDFQVEVPIYYNSRRVEGQEMAKDRNGDPVTGYVRISHQVYNVTKDYERLRDAVNKLVSEGFTSINLRPSEKQEA

SEQ ID NO: 253 - DNA, 1386 bp, Sorghum bicolor
atggcctcggctccgcacggcgacgctgccgaggtcaggaacgccgcgccgccggcaaagcgcgccagcgcaccgatcacggaagccgatatccgcgccgagttcgcccaccacgacggcagcgtggcccgcgtcaacaacggcaccttcgggtgctgcccggcctcggtcctcgcggcgcgggcgcggtggcagcggctgttcctctcgcagcccgacgcgttctacttcgactccctgcagccggggctcgcccgctcgcgtgccgcggtagcggctgccgtcggggcgtgtgacgcctccgaggtctccctcgtcgacaacgctaccacggcggcggccatcatcatgcagcacgtggcctggagcttcgcggagggcgtcttcgcgcgcggcgacgtggtgctgatgctccactacacctacagctccgtcaagaactccatccacgcgtacgtggtccgcgcgggggccaccgtcgtcgaggtgccgctcccgttccccgtcgcctcgccgggcgccgtcgtcgccgagttccgcaccgcgctcgcgctcgccaaggccgggggccgcagcgtccgcctcgccgtcatcgaccacatcacctccatgcccagcgtcctcctccccgtgaaggagctcgtcgccatctgccgcgaggagggcgtggacaaggtcttcgtcgacggcgcgcacgccatcggccaggtgcccatcgacgtgcgcgacatcggcgccgacttctacaccagcaacctccacaagtggttcttctgcccttccgccgtggcgttcctgcacatccgcaaggatgaccccgtagccaagcagctccaccaccccgtcgtgtctagcgagtacggcaacgggctgcccatggagagcgcctggattggggtgcgggattacagtgcccagctcgttgtgcctgatgccgttgacttcatgagccggttcgagggcggcgtcgaggcgataagcagacggaaccatgacaaggtgatcgagatgggcacgatgctcgccgaggcatgggggacgtttcttggctcgccgccggaaatgtgcggaagcatggctatggtcgggctgcctggttgccttgccattgagagcggtggtgatgcgatgagagtaagggacatgctgaggaacgaattcaaggtcgaggtgccaatattccacaactcaagaagtgttgaagaaggtcaagagttggccaaggatgccaagggcgatcaagtcagtgggtatgtgagaatttcacatcaggtttacaatgtcagggaggagtatgagaccctgagagatgctgtccataagcttgttcttgatggtttctcctgcagcaagatgagaccttctgggaaggctctctctaactga

SEQ ID NO: 254 - protein, 461 aa, Sorghum bicolor
MASAPHGDAAEVRNAAPPAKRASAPITEADIRAEFAHHDGSVARVNNGTFGCCPASVLAARARWQRLFLSQPDAFYFDSLQPGLARSRAAVAAAVGACDASEVSLVDNATTAAAIIMQHVAWSFAEGVFARGDVVLMLHYTYSSVKNSIHAYVVRAGATVVEVPLPFPVASPGAVVAEFRTALALAKAGGRSVRLAVIDHITSMPSVLLPVKELVAICREEGVDKVFVDGAHAIGQVPIDVRDIGADFYTSNLHKWFFCPSAVAFLHIRKDDPVAKQLHHPVVSSEYGNGLPMESAWIGVRDYSAQLVVPDAVDFMSRFEGGVEAISRRNHDKVIEMGTMLAEAWGTFLGSPPEMCGSMAMVGLPGCLAIESGGDAMRVRDMLRNEFKVEVPIFHNSRSVEEGQELAKDAKGDQVSGYVRISHQVYNVREEYETLRDAVHKLVLDGFSCSKMRPSGKALSN

SEQ ID NO: 255 - DNA, 1365 bp, Solanum lycopersicum
atggaaccggcgaacgacgatgaccaccgagctaatggctccgaccacagtcatttggctaagaaacctaagctgtccaccagatcgtcttctctcattacggattccgaaatacgtgaagagttcgcccatcatcagaccgggatagctcgtatcaataatggcagcttcggtagctgtccggcatccatcatcgcagctcagaagcgttggcagctccgttttctacagcaacccgatgacttcttccttaaccatcttcagaagcggattctacattcacggactattatcaaggatgttattaatgcggagcacgtggatgaggtatctcttgtggataacgctactactgccgctgctatcgttcttcaacatgttggatgggctttcgcggagggacggtttaagaaaggagatgctgtagtcatgctccattgtgcgtttcaggctgttaagaaatcgattgaagcttatgtcacccgggctggtggttctgtgatcgttgttcatttgccctttcctcttcgttcggaggaagagattgttgcggagtttcggaaagccttggctaaggggaaagcgaatggaaagaaggttcggttggctatcattgatcacattacatcaatgccgtgtgttgtcatacctgtgcgtgatttggttaagatttgtagggaagaaggtgttgaacgagtatttgtcgatgctgcccatgccattggcagtgttcctgtcgatgttaaagaaattggagctgatttttatgtaagcaacttgcacaagtggtttttctgtcctccatcggttgcctttttgtattgtcggaaatcacctgtatcacctgatctacaccatcctgtggtgtcgcatgaatatggtaatggactagccattgaaagtgcatggatagggacgagagactacagctctcagctagttatacctgaggtgttagaatttataaataggtttgagggtgggattgagggaattaggttgaggaatcataaggctgtgattgaaatgggacaaatgttggccaatgcttggggaacatcgcttggctgcccccctgacatgtctccaggtatggcaatggttggtttgcctgttaaccttaagattctcagcgataaggatgctttaaatttgagaaatcatttgcgtgaccattttgcggtggaagtcccaattcactacgaggaaataaaggaattacaggatggtgatggctacgtgacaggatatgctcggatttctcatcaggtttacaataaggttgatgactatataaagttgaaggatgcaattcttcagcttgtgcgagacggagtaacttgtaagatgcttcactcagaataa

SEQ ID NO: 256 - protein, 454 aa, Solanum lycopersicum
MEPANDDDHRANGSDHSHLAKKPKLSTRSSSLITDSEIREEFAHHQTGIARINNGSFGSCPASIIAAQKRWQLRFLQQPDDFFLNHLQKRILHSRTIIKDVINAEHVDEVSLVDNATTAAAIVLQHVGWAFAEGRFKKGDAVVMLHCAFQAVKKSIEAYVTRAGGSVIVVHLPFPLRSEEEIVAEFRKALAKGKANGKKVRLAIIDHITSMPCVVIPVRDLVKICREEGVERVFVDAAHAIGSVPVDVKEIGADFYVSNLHKWFFCPPSVAFLYCRKSPVSPDLHHPVVSHEYGNGLAIESAWIGTRDYSSQLVIPEVLEFINRFEGGIEGIRLRNHKAVIEMGQMLANAWGTSLGCPPDMSPGMAMVGLPVNLKILSDKDALNLRNHLRDHFAVEVPIHYEEIKELQDGDGYVTGYARISHQVYNKVDDYIKLKDAILQLVRDGVTCKMLHSE

SEQ ID NO: 257 - DNA, 1266 bp, Selaginella moellendorffii
atgccgattgtggaatccggcaagatctgggaggagatgctggctcgcgaattctcgcaccacaggcaaggaatcgcgagaatcaacaatgggagctttgggagctgtcctcgatcggtcctggaggcgcagcagcggtggcacaggcagtggctggagcagccggacgagttctacttcggccccctggagaagggattgcgcgcgtcgcgggaggcgatcgcgtccatcatccgcgcccccgacgtggaggagatcgtcctggtggacaacgtgaccacggcggcggcgatgatcgcccaggacatggcgtggggattcctggagaagagattccaccccggcgacgccatcctcatgctcaactgcagctatgccgccgtgaagaagtgcttcgaggcctacgctgttcgcgcaggcgcgaggatcatcgaggtggagctcgcgcttccaattctctccgcccggcagatcatcgacagcttccagcgatcgctggagcaggccgccaagagctccaccaccatccggctggcggtgatcgaccacatcacctcgatgccatcggtggttctcccggcgcgagatctcgtcgccctttgccgcgacgctggagtggagcagatcttcgtggatggcgctcacgcgatcggcaacatcgagctgagcatggaggagatcgacgccgactactactcgagcaatctccacaagtggctcttcgctccacacagcgtcgcgttcctccacgccaaggccaagcatctggagcgcctccaccacccggtggtgtctcacaacttcaagctggggctcttcagcgagtgttcttgggtggggacgagagactacagctcccagctcgccgtgaccgccgcggtggagttcatcgatgggaatctaggtggcctctccagtctcatcgctttcaatcaccggggggcgatggcgatggcggagatgctcgcggcggcgtgggggacgcagtgtgggacgtgtgccgagcttgcttcgtccatggcgatggtggagctcccggcgaagctggaagtggcgagcgaggaggcggcgctggagatgaggacgaggctgcgcagggagtttggagtggaggtcccgatttgcttccaggcggggggatcgcccagcgcgaattcgaagagcatgagatccgggacggcgtacgcgagagtttctcaccagatttacaacaagctcgaggactacacgaggctgcgagacgctgtgaaatccttggctcgctag

SEQ ID NO: 258 - protein, 421 aa, Selaginella moellendorffii
MPIVESGKIWEEMLAREFSHHRQGIARINNGSFGSCPRSVLEAQQRWHRQWLEQPDEFYFGPLEKGLRASREAIASIIRAPDVEEIVLVDNVTTAAAMIAQDMAWGFLEKRFHPGDAILMLNCSYAAVKKCFEAYAVRAGARIIEVELALPILSARQIIDSFQRSLEQAAKSSTTIRLAVIDHITSMPSVVLPARDLVALCRDAGVEQIFVDGAHAIGNIELSMEEIDADYYSSNLHKWLFAPHSVAFLHAKAKHLERLHHPVVSHNFKLGLFSECSWVGTRDYSSQLAVTAAVEFIDGNLGGLSSLIAFNHRGAMAMAEMLAAAWGTQCGTCAELASSMAMVELPAKLEVASEEAALEMRTRLRREFGVEVPICFQAGGSPSANSKSMRSGTAYARVSHQIYNKLEDYTRLRDAVKSLAR

SEQ ID NO: 259 - DNA, 1239 bp, Selaginella moellendorffii
atgactgtgtcgatgcaaggccaagaggccgggagtatccagagaatgccgattgtaggatccggcaagatctgggaggagatgctggctcgcgaattctcgcatcacaggcaaggaatcgcgagaatcaacaatgggagctttgggagctgtcctcgatcggtcctggaggcgcagcagcgatggcacaggcagtggctggagcagccggacgagttctacttcggccccctggagaagagattgcgcgcgtcgcgggaggcgatcgcgtcgatcatccgcgcccccaacgtggaggagatcgtcctggtggacaacgtgacgacggcggcggcgatgatcgcccaggacatggcgtggggattcctggagaagagattccaccccggcgacgccatcctcatgctcaattgcagctatgccgccgtgaagaagtgcttcgaggcctacgctgttcgcgccggcgcgaggatcatcgaggtggagctcgcgcttccaatcctctccgcccggcagatcatcgacagcttccagcgatcgctggagcaggccgccaagagctccaccaccatccggctggcggtgatcgaccacatcacctcgatgccatcggtggttctcccggcgcgagatctcgtcgccctttgccgcgacgctggagtggagcagatcttcgtggacggagctcacgcgatcggcaacatcgagctgagcgtggaggagatcgacgccgactactactcgagcaatctccacaagtggctcttcgctccacatagcgtcgcgttcctccacgccaaggccaagcacctggagcgcctccaccacccggtggtgtctcacaacttcaagctggggctcttcagcgagtgttcttgggtggggacgagagactacacctcccagctcgctgtgaccgccgcggtggagttcatcgatgggaatctaggtggcctctccagtctcatcgctttcaatcaccgccgggcgatggcgatggcggagatgctcgcggcggcgtgggggacgcagtgtgggacgtgtgccgagcttgcgcagggagtttggagtggaggtgccgatttgcttccaggcggggggatcgcccagcgcgaattcgaagagcaagagatccgggacggcggatggagctcggaaaatgcaatggatttctgccgatcgagtcgcattccgtggagatcggcgcaatgctgctcgagcactgtggtgaatctttga

SEQ ID NO: 260 - protein, 412 aa, Selaginella moellendorffii
MTVSMQGQEAGSIQRMPIVGSGKIWEEMLAREFSHHRQGIARINNGSFGSCPRSVLEAQQRWHRQWLEQPDEFYFGPLEKRLRASREAIASIIRAPNVEEIVLVDNVTTAAAMIAQDMAWGFLEKRFHPGDAILMLNCSYAAVKKCFEAYAVRAGARIIEVELALPILSARQIIDSFQRSLEQAAKSSTTIRLAVIDHITSMPSVVLPARDLVALCRDAGVEQIFVDGAHAIGNIELSVEEIDADYYSSNLHKWLFAPHSVAFLHAKAKHLERLHHPVVSHNFKLGLFSECSWVGTRDYTSQLAVTAAVEFIDGNLGGLSSLIAFNHRRAMAMAEMLAAAWGTQCGTCAELAQGVWSGGADLLPGGGIAQREFEEQEIRDGGWSSENAMDFCRSSRIPWRSAQCCSSTVVNL

SEQ ID NO: 261 - DNA, 1365 bp, Solanum tuberosum
atggaaccggcgaacgacgatgaccaccgagctaatggctccgaccacagccatttggctaagaaacctaagctgtccaccagctcgtcttctctcattacggattccgaaatacgtgaagagttctcccatcatcagcccgggatagctcgtatcaataacggcagcttcggtagctgcccggcgtccatcatcgcagctcagaagcattggcagctccgttttctacagcaacccgatgacttcttccttaaccatcttcagaagcggattcttcattcacggactattatcaaggatgttattaatgcggagcacgtggatgaggtatctcttgtggataacgctactactgctgctgcaatcgttcttcaacatgttggatgggctttcgcggagggacgtttcaagaagggagatgctgtggtcatgctccattgtgcgtttcaggctgttaagaaatcgattgaggcttatgtcacccgtgctggtggttctgtgatcgttgttcatttgccgtttcctcttcgttcggaggaagagattgttgcggagtttcggaaagcgttggctaaggggaaagcgaatggaaagaaggttcggttggctatcattgatcacattacatcaatgccgtgtgttgtcatacctgtgcgtgatttggttaagatttgtagggaagaaggtgttgaacgggtgtttgtcgatgctgcccatgccattggcagtgttcctgtcgatgttaaagaaattggagctgatttttatgtaagcaacttgcacaagtggtttttctgtcctccttcggttgcctttttgtattgtcggaaatcacctgtatcacctgatctacaccatcctgtggtgtctcatgaatatggtaatggtctagccattgaaagtgcatggatagggacgagagactacagctctcagctagttatacctgaggtgttagaatttataaataggtttgaaggtgggattgagggaataaggttgaggaatcataaggctgtgattgaaatgggacaaatgttggccaatgcttggggaacatcgcttggctgccctcctgacatgtctccaggtatggcaatggttggtttgcctgttaaccttaggattctcagcgataaggatgctttaactttgagaaatcatttgcgtgaccattttggggtggaagtcccaattcactacgaggaaataaaggaattacaggatggtgatggctacgtgacaggatatgctcggatttctcatcaggtttacaataaggttgatgactatataaagttgaaggatgcaattcttcagcttgtgcgagacggagttacttgtaagatgcttccctcagaataa

SEQ ID NO: 262 - protein, 454 aa, Solanum tuberosum
MEPANDDDHRANGSDHSHLAKKPKLSTSSSSLITDSEIREEFSHHQPGIARINNGSFGSCPASIIAAQKHWQLRFLQQPDDFFLNHLQKRILHSRTIIKDVINAEHVDEVSLVDNATTAAAIVLQHVGWAFAEGRFKKGDAVVMLHCAFQAVKKSIEAYVTRAGGSVIVVHLPFPLRSEEEIVAEFRKALAKGKANGKKVRLAIIDHITSMPCVVIPVRDLVKICREEGVERVFVDAAHAIGSVPVDVKEIGADFYVSNLHKWFFCPPSVAFLYCRKSPVSPDLHHPVVSHEYGNGLAIESAWIGTRDYSSQLVIPEVLEFINRFEGGIEGIRLRNHKAVIEMGQMLANAWGTSLGCPPDMSPGMAMVGLPVNLRILSDKDALTLRNHLRDHFGVEVPIHYEEIKELQDGDGYVTGYARISHQVYNKVDDYIKLKDAILQLVRDGVTCKMLPSE

SEQ ID NO: 263 - DNA, 1407 bp, Triticum aestivum
atggcgtcgatcccgtctgacgaggtctccgagaacggccacggcaacggaaacggcccatccccgccgcgcgccaagcgcccccgcgcagcgttgatctcggccgcccagatccgcgacgagttcgcgcatcacgaccccgcagttgcccgcgtcaacaacggcagcttcggctgctgcccggcctccgtgctcgaagcgcaggcgcgctggcagcgcctcttcctcgctcagcccgacgccttctacttcgacggccttcagccggggctccgccgctcccgcgcagccgtcgcggcccttgtcaacgctggggacgtctccgagatttccctcgtcgacaacgctaccaccgctgctgcaatcgtgctgcagcatgccgcctggagctttgccgaggggcacttcgctcgtggcgacgctgtgctcatgctccattacgcctacggagcagtaaagaaatctatccaggcctacgttgcccgcgcgggcgccactgtcgtcgaggtacccctcccgttcccggtcacctcccctgacgccattattgcggagttccatgctgcgctcgctgttgccaaggccggtggtcgtaaggtccggcttgctgtcattgatcacatcacctccatgcccagtgttctcattccagtcaaggagctagttgccatttgtcgccaagagggcgtcgacaaagtttttgttgatgctgcacactctgttgggcaagtccctgtctctgtgcgagacattggggcggatttctacactagcaacctccacaagtggttcttttgccccccggccgtggctttcttacacacccgcaagggtggcccgataacctctcagctccaccaccctgttgtgtcacatgaatatggcaacgggctacctatggagagtggatggattgggacacgggattacagtgcccagatcgtcgttcctgaagctattcactttgtgaaccgatttgaaggtgggattgaggggatacgcagccggaaccatgagaaggtaattgagatggggaggatgcttgccgaagcatgggggacagttcttggatcaccaccagtaatgtgtggaagcatggctatggtagggatgcctagttgtctttgcattgagagtgacgatgatgcactgagagtgcggaccatgttgaggaaggatttcaaagttgaggtgcctatatactacaatagcagacaggttaaagtgcaagagatggcaaaggataatagtagtgatccagtgacggggtatgtaagaatctcacaccaggtttacaatgtcaaggaggagtatgagaggctgagagatgctgtcaataagcttgttgctgaggggttcaccagtgccgaattgaggccagctgagaagcaagaagctctggcttga

SEQ ID NO: 264 - protein, 468 aa, Triticum aestivum
MASIPSDEVSENGHGNGNGPSPPRAKRPRAALISAAQIRDEFAHHDPAVARVNNGSFGCCPASVLEAQARWQRLFLAQPDAFYFDGLQPGLRRSRAAVAALVNAGDVSEISLVDNATTAAAIVLQHAAWSFAEGHFARGDAVLMLHYAYGAVKKSIQAYVARAGATVVEVPLPFPVTSPDAIIAEFHAALAVAKAGGRKVRLAVIDHITSMPSVLIPVKELVAICRQEGVDKVFVDAAHSVGQVPVSVRDIGADFYTSNLHKWFFCPPAVAFLHTRKGGPITSQLHHPVVSHEYGNGLPMESGWIGTRDYSAQIVVPEAIHFVNRFEGGIEGIRSRNHEKVIEMGRMLAEAWGTVLGSPPVMCGSMAMVGMPSCLCIESDDDALRVRTMLRKDFKVEVPIYYNSRQVKVQEMAKDNSSDPVTGYVRISHQVYNVKEEYERLRDAVNKLVAEGFTSAELRPAEKQEALA

SEQ ID NO: 265 - DNA, 1338 bp, Vitis vinifera
atggattccgaccgcggagagaacggcgactcctctcacaaccacgtttccaagaagccaaagctctctgctttcatatccgaagaggaaatccgacaagagttctctcatcaccagcgtggaatcgcgcgaatcaacaacggtagtttcggaagctgccccgcttccataatcgccgctcagaaggagtggcagctccgatttcttcaacagcctgatgatttctacttcaatcacctccggaagggcttgctcgaatccagaactgttgtaaagggcctcatcaatgctgactccgtcgacgaagtttccctcatcgacaacgctaccacggccgccgctatcgtgctccaacagatcggccgcgccttcgcccaaggtaaatttcaaaaaggcgatgtcgttgtcatgctccactgcgctttccagtcggtgaagaagtcgattcaggcctatgttactggagccggtggctccgtcatcgaagtccaattgccatttccattgacgtcgaaagaggaaatcgtttctgagtttaggaaaggtttagagaaaggtaaatccgatggtaggcatgttaggttagctataattgatcatataacatcaatgccgtgcgttgtggtgcccgtagaggaattggttaagatttgtaggcaggaaggggtcgaccaggtgtttgtagatgcagctcatgctattggtagtgttcctgttgatgttaaagaaattggggctgatttctacgttagtaatttgcataagtggttcttttgcccgccttcagttgcatttttgtattgtagaaaatcgcctttatcatctgaagtgcaccatccggtggtttcccatgaatttggaaatggattggctatagaaagttcatggatagggacaagggattacagttcacagcttgttgttccttcagttttggagtttgtgaataggttcgaaggtggtattgagggtattatgatgaggaatcatgaaattgttgttaaaatgggagaaatgcttgctaagtcctggggaacaaatcttggggcacctccggaaatgtgtgctagcatgattatggttggtttgccttctagattgtttatttccagtgaggaagatgctatgagattgaggtcgtatttgcgtcagcatcatggtattgaagttcccttacattatcaggctccctcagatgataaggatggtcttgtaacaggttatgctaggatttctcatcaagtttataacagttttgacgattattgcaagtttagggatgcaattaatcaacttgttgagcagcgacggagttgcaaaatgctttttatggaataa

SEQ ID NO: 266 - protein, 445 aa, Vitis vinifera
MDSDRGENGDSSHNHVSKKPKLSAFISEEEIRQEFSHHQRGIARINNGSFGSCPASIIAAQKEWQLRFLQQPDDFYFNHLRKGLLESRTVVKGLINADSVDEVSLIDNATTAAAIVLQQIGRAFAQGKFQKGDVVVMLHCAFQSVKKSIQAYVTGAGGSVIEVQLPFPLTSKEEIVSEFRKGLEKGKSDGRHVRLAIIDHITSMPCVVVPVEELVKICRQEGVDQVFVDAAHAIGSVPVDVKEIGADFYVSNLHKWFFCPPSVAFLYCRKSPLSSEVHHPVVSHEFGNGLAIESSWIGTRDYSSQLVVPSVLEFVNRFEGGIEGIMMRNHEIVVKMGEMLAKSWGTNLGAPPEMCASMIMVGLPSRLFISSEEDAMRLRSYLRQHHGIEVPLHYQAPSDDKDGLVTGYARISHQVYNSFDDYCKFRDAINQLVEQRRSCKMLFME

SEQ ID NO: 267 - DNA, 1416 bp, Zea mays
atggcgtcggacccggcccctgacgacgcggccgcggccgtgaatgggcacggcaacgacaacggacacggtaacggcccgtccccgtcgaagcgcccccgggcggtgatctcggaagccgagatccgcgtcgagttcgcacaccacgacgcagccgtggcgcgcgtcaacaacggcagcttcggctgctgcccggcctcggtcctcgccgcgcaggcccactggcagcgcctcttcctcgcgcagcccgacgccttctacttccacgttctccagcagggccttctccgctcgcgcgccgccgtcgccgaggtggtgggcgctggcgacgtctccgaggtctccctcgtcgataacgccaccacggccgccgccatcgtcctgcagcacgcagcctggagcttcgccgagggtcacttcgcgcgcggggatgcggtgctgatgctccactacgcctatggtgcggtcaagaagtccatccacgcgtacgtcgcgcgtgcgggggccaccgtcgtcgaggtgcccctcccattccccgtcgcgtccgccgacgcaatcattgccgagttccgtgctgcgctcgcggtcgccaaggaaggagggcgtagggtcaggctcgcagtcatcgaccacattacctccatgcccagtgtcgtcatcccagtcaaggagctcgtcgccatctgtcgagaagagggcgttgacaaggtatttgttgacgctgcccactctattgggcaggtgcctgtggacgtgcgcgacattggagccgatttctatacaagcaaccttcataagtggttcttttgcccccctgctgtggcctttttgcatactcgcaaggatgacccgatagcctcccaactccatcaccctgttgtttcccatgagtatgggaatgggctgcctatggagagcggatggattggaacacgggattacagtgcccagcttgttgtgtccgaggctatagattttgtgaatcgatttgagggtggaattgaggctatacgaaaccggaatcatgagaaagttattgagatgggtaggatgcttgctgaggcatgggggacttttcttggctcacctccggaactgtgtggtagcatggttatggtggggatgcctggttgccttggtgttgagagtgatgatgatgcaatgagagtgaggacaatgttgaggccactggtgaggacttctctgttgagccagctgatgagaggaggccatcccgtgctctcttggatgttggccttatcaggactacaacagggaaccgtgtctttggtgccctcaaggtatatatcttatgtctgttaccatgatattatattggtgtcattgtttgtatttagcccatcgagaataatcattatttcatgggcttgctgtatgagtcatctcttgtggtga

SEQ ID NO: 268 - protein, 471 aa, Zea mays
MASDPAPDDAAAAVNGHGNDNGHGNGPSPSKRPRAVISEAEIRVEFAHHDAAVARVNNGSFGCCPASVLAAQAHWQRLFLAQPDAFYFHVLQQGLLRSRAAVAEVVGAGDVSEVSLVDNATTAAAIVLQHAAWSFAEGHFARGDAVLMLHYAYGAVKKSIHAYVARAGATVVEVPLPFPVASADAIIAEFRAALAVAKEGGRRVRLAVIDHITSMPSVVIPVKELVAICREEGVDKVFVDAAHSIGQVPVDVRDIGADFYTSNLHKWFFCPPAVAFLHTRKDDPIASQLHHPVVSHEYGNGLPMESGWIGTRDYSAQLVVSEAIDFVNRFEGGIEAIRNRNHEKVIEMGRMLAEAWGTFLGSPPELCGSMVMVGMPGCLGVESDDDAMRVRTMLRPLVRTSLLSQLMRGGHPVLSWMLALSGLQQGTVSLVPSRYISYVCYHDIILVSLFVFSPSRIIIISWACCMSHLLW

SEQ ID NO: 269 - DNA, 1377 bp, Zea mays
atggcctcggctccgcacgacgacgcggccaagggcaggaacgctgcgccgccggaaaaacgcaccagcgcaactatcacggaagccgatattcgcgccgagttcgcgcaccacgacggcaccgtagcccgcgtcaacaacggcaccttcggctgctgcccggcgtcggtcctcgcggcgagggcgcggtggcaacggctttttctctctcagcccgacgcgttctacttcgactctctccagccggggctcgcccgctcgcgtgccgccgtggcgtccgccgtcggggcgggtgacgcctccgaggtctccctcgtcgacaacgctaccacggccgcggccatcatcatgcagcacgtggcctggagcttcgcggagggcgccttcgcacgcggcgacgtggtgctcatgctccactacacctacagctccgtcaagaagtccatccacgcgtacgtggtccgcgcgggggccaccgtcgtcgaggtgccgctcccgttccccgtcgcctcggcggtcgccgtcgtcgccgagttccgtgccgcgctcgcgctcgcccaggctgggggccgcagagtccgcctcgccgtcatcgaccacatcacctcgatgcccagcgtcctcctccccgtgaaggagctcgtcgccatctgccgcgaggagggcgtggacaaggtcttcgtcgacggggcgcacgccatcggccaggtgcccatcgacgtgcgcgacatcggcgccgacttctacaccagcaacctccacaagtggttcttctgcccttccgccgtggccttcctgcacatccgcaaggatgaccccgtagcctcgcagctccaccaccccgtcgtgtctagcgagtacggcaacgggctgcccatggagagcgcctggatcggggtgcgggattacagtgcccagctcgttgtgcctgatgccgttgacttcatgagacggttcgagggcggcatcgagacgataagcaaacggaaccatgagaaggtgatcgagatgggcacgatgctcgccgaggcttgggggacgtttcttggctcgccgccggaaatgtgcggaagcatggctatggtcgggctgccaggttgccttggcattgagagcgatgatgatgcgatgagagtgagggacatgctgaggaacgaattcaaggtcgaggtgccaatattcaacaactcaagaagtgttgaggaaggacaagagatggccaagggcgatcaagtgacagggtacgtgagaatctcacatcaggtttacaatgtcacggaggagtatgaggtcttgagagatgccgtaggcaagcttgttcttgatggtttctcctgcaccaagctgagaccttctgagaaggttatttctaactga

SEQ ID NO: 270 - protein, 458 aa, Zea mays
MASAPHDDAAKGRNAAPPEKRTSATITEADIRAEFAHHDGTVARVNNGTFGCCPASVLAARARWQRLFLSQPDAFYFDSLQPGLARSRAAVASAVGAGDASEVSLVDNATTAAAIIMQHVAWSFAEGAFARGDVVLMLHYTYSSVKKSIHAYVVRAGATVVEVPLPFPVASAVAVVAEFRAALALAQAGGRRVRLAVIDHITSMPSVLLPVKELVAICREEGVDKVFVDGAHAIGQVPIDVRDIGADFYTSNLHKWFFCPSAVAFLHIRKDDPVASQLHHPVVSSEYGNGLPMESAWIGVRDYSAQLVVPDAVDFMRRFEGGIETISKRNHEKVIEMGTMLAEAWGTFLGSPPEMCGSMAMVGLPGCLGIESDDDAMRVRDMLRNEFKVEVPIFNNSRSVEEGQEMAKGDQVTGYVRISHQVYNVTEEYEVLRDAVGKLVLDGFSCTKLRPSEKVISN

SEQ ID NO: 271 - DNA, 1413 bp, Zea mays
atggcgtcggacccggcccctgacgacgcggccgcggccgtgaatgggcacggcaacgacaacggacacggtaacggcccgtccccgtcgaagcgcccccgggcggtgatctcggaagccgagatccgcgtcgagttcgcacaccacgacgcagccgtggcgcgcgtcaacaacggcagcttcggctgctgcccggcctcggtcctcgccgcgcaggcccactggcagcgcctcttcctcgcgcagcccgacgccttctacttccacgttctccagcagggccttctccgctcgcgcgccgccgtcgccgaggtggtgggcgctggcgacgtctccgaggtctccctcgtcgataacgccaccacggccgccgccatcgtcctgcagcacgcagcctggagcttcgccgagggtcacttcgcgcgcggggatgcggtgctgatgctccactacgcctatggtgcggtcaagaagtccatccacgcgtacgtcgcgcgtgcgggggccaccgtcgtcgaggtgcccctcccattccccgtcgcgtccgccgacgcaatcattgccgagttccgtgctgcgctcgcggtcgccaaggaaggagggcgtagggtcaggctcgcagtcatcgaccacattacctccatgcccagtgtcgtcatcccagtcaaggagctcgtcgccatctgtcgagaagagggcgttgacaaggtatttgttgacgctgcccactctattgggcaggtgcctgtggacgtgcgcgacattggagccgatttctatacaagcaaccttcataagtggttcttttgcccccctgctgtggcctttttgcatactcgcaaggatgacccgatagcctcccaactccatcaccctgttgtttcccatgagtatgggaatgggctgcctatggagagcggatggattggaacacgggattacagtgcccagcttgttgtgtccgaggctatagattttgtgaatcgatttgagggtggaattgaggctatacgaaaccggaatcatgagaaagttattgagatgggtaggatgcttgctgaggcatgggggacttttcttggctcacctccggaactgtgtggtagcatggttatggtggggatgcctggttgccttggtgttgagagtgatgatgatgcaatgagagtgaggacaatgttgagaaaggatttccaggtggaggtgccggtatactacaactcaagaagggtggaaggacaggagatgacaaaggataaaaatggtgatccagtgacagggtatgtgaggatctcacaccaggtttacaatgtcacagaggactatgagagactgagggatgttgtcaataaacttgtttctgaagggttcaccagcagcaagttgcggccttctgagaagcaagaagcttag

SEQ ID NO: 272 - protein, 470 aa, Zea mays
MASDPAPDDAAAAVNGHGNDNGHGNGPSPSKRPRAVISEAEIRVEFAHHDAAVARVNNGSFGCCPASVLAAQAHWQRLFLAQPDAFYFHVLQQGLLRSRAAVAEVVGAGDVSEVSLVDNATTAAAIVLQHAAWSFAEGHFARGDAVLMLHYAYGAVKKSIHAYVARAGATVVEVPLPFPVASADAIIAEFRAALAVAKEGGRRVRLAVIDHITSMPSVVIPVKELVAICREEGVDKVFVDAAHSIGQVPVDVRDIGADFYTSNLHKWFFCPPAVAFLHTRKDDPIASQLHHPVVSHEYGNGLPMESGWIGTRDYSAQLVVSEAIDFVNRFEGGIEAIRNRNHEKVIEMGRMLAEAWGTFLGSPPELCGSMVMVGMPGCLGVESDDDAMRVRTMLRKDFQVEVPVYYNSRRVEGQEMTKDKNGDPVTGYVRISHQVYNVTEDYERLRDVVNKLVSEGFTSSKLRPSEKQEA

SEQ ID NO: 273 - protein, 50 aa, Artificial sequence
  motif 7
  VARIANT (7)..(7): Xaa can be Asp or Glu
  VARIANT (8)..(8): Xaa can be Gln or Lys
  VARIANT (13)..(13): Xaa can be Ala or Gly
  VARIANT (16)..(16): Xaa can be Ala or Ser
  VARIANT (19)..(19): Xaa can be Gln, Ser or Cys
  VARIANT (21)..(21): Xaa can be Pro, Asp or Glu
  VARIANT (22)..(22): Xaa can be Val or Ile
  VARIANT (23)..(23): Xaa can be Asp or Asn
  VARIANT (24)..(24): Xaa can be Val or Met
  VARIANT (25)..(25): Xaa can be Lys or Arg
  VARIANT (26)..(26): Xaa can be Glu or Asp
  VARIANT (33)..(33): Xaa can be Thr or Val
  VARIANT (45)..(45): Xaa can be Ser or Ala
  VARIANT (50)..(50): Xaa can be Tyr or His
CREEGVXXVFVDXAHXIGXVXXXXXXIGADFYXSNLHKWFFCPPXVAFLX

SEQ ID NO: 274 - protein, 50 aa, Artificial sequence
  motif 8
  VARIANT (3)..(3): Xaa can be Ser or Ala
  VARIANT (6)..(6): Xaa can be Asp or Asn
  VARIANT (8)..(8): Xaa can be Gly, Ala or Asn
  VARIANT (12)..(12): Xaa can be Ile or Val
  VARIANT (19)..(19): Xaa can be Cys or Ser
  VARIANT (22)..(22): Xaa can be Ala or Gly
  VARIANT (24)..(24): Xaa can be Val or Ile
  VARIANT (25)..(25): Xaa can be Leu or Ile
  VARIANT (29)..(29): Xaa can be Ala, Arg or Lys
  VARIANT (30)..(30): Xaa can be Arg or Asn
  VARIANT (33)..(33): Xaa can be Leu or Arg
  VARIANT (34)..(34): Xaa can be Leu, Arg or Gln
  VARIANT (37)..(37): Xaa can be Arg, Gln or Ala
  VARIANT (41)..(41): Xaa can be Ala or Asp
  VARIANT (45)..(45): Xaa can be Asn or Asp
  misc_feature (46)..(46): Xaa can be any naturally occurring amino acid
  VARIANT (48)..(48): Xaa can be Gln, Arg or Lys
  VARIANT (49)..(49): Xaa can be Pro or Lys
EFXHHXPXVARXNNGSFGXCPXSXXAAQXXWQXXFLXQPDXFYFXXLXXG

SEQ ID NO: 275 - protein, 50 aa, Artificial sequence
  motif 9
  VARIANT (2)..(2): Xaa can be Leu or Ile
  VARIANT (16)..(16): Xaa can be His or Gln
  VARIANT (17)..(17): Xaa can be Val, Ala or Ile
  VARIANT (18)..(18): Xaa can be Ala or Gly
  VARIANT (19)..(19): Xaa can be Trp or Arg
  VARIANT (20)..(20): Xaa can be Ala or Ser
  VARIANT (25)..(25): Xaa can be Arg, Lys or Asn
  VARIANT (28)..(28): Xaa can be Lys or Arg
  VARIANT (29)..(29): Xaa can be Gly or Asn
  VARIANT (31)..(31): Xaa can be Ala, Val or Thr
  VARIANT (33)..(33): Xaa can be Leu or Val
  VARIANT (37)..(37): Xaa can be Tyr or Cys
  VARIANT (40)..(40): Xaa can be Gly or Gln
  VARIANT (41)..(41): Xaa can be Ala or Ser
  VARIANT (47)..(47): Xaa can be Glu, Gln or His
SXVDNATTAAAIVLQXXXXXFAEGRFAXXDXVXMLHXAYXXVKKSIXAYV

SEQ ID NO: 276 - DNA, 56 bp, Artificial sequence
  primer: prm18733
ggggacaagtttgtacaaaaaagcaggcttaaacaatgcaagaaaactccaaagat

SEQ ID NO: 277 - DNA, 50 bp, Artificial sequence
  primer: prm18734
ggggaccactttgtacaagaaagctgggtgcataccttctcactctggat

SEQ ID NO: 278 - DNA, 2194 bp, Oryza sativa; identical to SEQ ID NO: 189

SEQ ID NO: 279 - DNA, 3934 bp, Artificial sequence
  espression vector
aatccgaaaagtttctgcaccgttttcaccccctaactaacaatatagggaacgtgtgctaaatataaaatgagaccttatatatgtagcgctgataactagaactatgcaagaaaaactcatccacctactttagtggcaatcgggctaaataaaaaagagtcgctacactagtttcgttttccttagtaattaagtgggaaaatgaaatcattattgcttagaatatacgttcacatctctgtcatgaagttaaattattcgaggtagccataattgtcatcaaactcttcttgaataaaaaaatctttctagctgaactcaatgggtaaagagagagattttttttaaaaaaatagaatgaagatattctgaacgtattggcaaagatttaaacatataattatataattttatagtttgtgcattcgtcatatcgcacatcattaaggacatgtcttactccatcccaatttttatttagtaattaaagacaattgacttatttttattatttatcttttttcgattagatgcaaggtacttacgcacacactttgtgctcatgtgcatgtgtgagtgcacctcctcaatacacgttcaactagcaacacatctctaatatcactcgcctatttaatacatttaggtagcaatatctgaattcaagcactccaccatcaccagaccacttttaataatatctaaaatacaaaaaataattttacagaatagcatgaaaagtatgaaacgaactatttaggtttttcacatacaaaaaaaaaaagaattttgctcgtgcgcgagcgccaatctcccatattgggcacacaggcaacaacagagtggctgcccacagaacaacccacaaaaaacgatgatctaacggaggacagcaagtccgcaacaaccttttaacagcaggctttgcggccaggagagaggaggagaggcaaagaaaaccaagcatcctccttctcccatctataaattcctccccccttttcccctctctatataggaggcatccaagccaagaagagggagagcaccaaggacacgcgactagcagaagccgagcgaccgccttctcgatccatatcttccggtcgagttcttggtcgatctcttccctcctccacctcctcctcacagggtatgtgcctcccttcggttgttcttggatttattgttctaggttgtgtagtacgggcgttgatgttaggaaaggggatctgtatctgtgatgattcctgttcttggatttgggatagaggggttcttgatgttgcatgttatcggttcggtttgattagtagtatggttttcaatcgtctggagagctctatggaaatgaaatggtttagggatcggaatcttgcgattttgtgagtaccttttgtttgaggtaaaatcagagcaccggtgattttgcttggtgtaataaagtacggttgtttggtcctcgattctggtagtgatgcttctcgatttgacgaagctatcctttgtttattccctattgaacaaaaataatccaactttgaagacggtcccgttgatgagattgaatgattgattcttaagcctgtccaaaatttcgcagctggcttgtttagatacagtagtccccatcacgaaattcatggaaacagttataatcctcaggaacaggggattccctgttcttccgatttgctttagtcccagaattttttttcccaaatatcttaaaaagtcactttctggttcagttcaatgaattgattgctacaaataatgcttttatagcgttatcctagctgtagttcagttaataggtaatacccctatagtttagtcaggagaagaacttatccgatttctgatctccatttttaattatatgaaatgaactgtagcataagcagtattcatttggattattttttttattagctctcaccccttcattattctgagctgaaagtctggcatgaactgtcctcaattttgttttcaaattcacatcgattatctatgcattatcctcttgtatctacctgtagaagtttctttttggttattccttgactgcttgattacagaaagaaatttatgaagctgtaatcgggatagttatactgcttgttcttatgattcatttcctttgtgcagttcttggtgtagcttgccactttcaccagcaaagttcatttaaatcaactagggatatcacaagtttgtacaaaaaagcaggcttaaacaatgcaagaaaactccaaagatgctcgaaacggcggcgactcgttgtcgacaacgccaacgcaggtctccaaaaaaccacgcgtcagcttctccataacagaacacgaaatccaccatgaattctctcaccacaaccctaatgtagcccgaattaacaacggtagcttcggtagctgccccggatccgtacttgctgctcaaaagaactggcagctccagttccttcaacaacctgacgacttctacttcaacactctccgtaaaggaattctccactcacgtactgtcatcaaagacctcatcaatgctgacgacgtcgacgagatctcccttgtcgataacgccaccactgccgccgccatcgtccttcaacaaattggccgtgccttcgctgaaggtaattttgctaaaaacgataccgttttaatgctccactgtgcttatcaagctgttaaaaaatcgattcaagcttacgtcacgcgtgctgggggttctgttatcgagattcagttaccgtttccggttacttcgaatgaggagataatttcggagtttaagagaggaatagagaaaggcaaagctaacggtaaaaaaattaggttagcgataattgatcatataacgtcgatgccgtgtgttgttattccggtaaaagagttggttaaaatttgcagagaagaaggtgtggatcaggtttttgttgatgcagctcatgctattggtagtgttgaaataaatgttaaagaaatcggggctgatttttatgtcagtaatttgcataagtggttcttttgccccccatcggttgcttttctgtattgtaagaaagcagcgagtttggaatttgatgtacaccatccggttgtttcacatgagtatggaaatggattgccgatagagagtgcgtggattgggactagggattatagctcacaattagtggtgccggcagctttggagtttgttaatcgatttgaggatgggattcaggggataatgaagaggaaccatgaggaggttgttaagatggggaaaatgctggccgaatcatgggggacaaatcttggttcttcaccggagatgtgtgcgggaatgatcatggttggtctgccttcgagattgcgtgtttcaagtgaagatgatgctttgaggttaagatcgcatttgcgtgagtgtcatggggttgaggttccgatacattatcagggtttaaaagatggtgaggagggagtgaaagataaggatggggttataacagcgtatgctaggatttctcatcaggtttataataagtctgaggattattgcaagcttagggatgctgtaaatcgtctttctgagaatctactgattcgcaaaacgttttatccagagtgagaaggtatgcacccagctttcttgtacaaagtggtgatatcacaagcccgggcggtcttctagggataacagggtaattatatccctctagatcacaagcccgggcggtcttctacgatgattgagtaataatgtgtcacgcatcaccatgggtggcagtgtcagtgtgagcaatgacctgaatgaacaattgaaatgaaaagaaaaaaagtactccatctgttccaaattaaaattggttttaaccttttaataggtttatacaataattgatatatgttttctgtatatgtctaatttgttatcatcc

SEQ ID NO: 280 - protein, 418 aa, Artificial sequence
  motif 10
ITEHEIHHEFSHHNPNVARINNGSFGSCPGSVLAAQKNWQLQFLQQPDDFYFNTLRKGILHSRTVIKDLINADDVDEISLVDNATTAAAIVLQQIGRAFAEGNFAKNDTVLMLHCAYQAVKKSIQAYVTRAGGSVIEIQLPFPVTSNEEIISEFKRGIEKGKANGKKIRLAIIDHITSMPCVVIPVKELVKICREEGVDQVFVDAAHAIGSVEINVKEIGADFYVSNLHKWFFCPPSVAFLYCKKAASLEFDVHHPVVSHEYGNGLPIESAWIGTRDYSSQLVVPAALEFVNRFEDGIQGIMKRNHEEVVKMGKMLAESWGTNLGSSPEMCAGMIMVGLPSRLRVSSEDDALRLRSHLRECHGVEVPIHYQGLKDGEEGVKDKDGVITAYARISHQVYNKSEDYCKLRDAVNRLSENL

SEQ ID NO: 281 - protein, 230 aa, Artificial sequence
  motif 11
NVARINNGSFGSCPGSVLAAQKNWQLQFLQQPDDFYFNTLRKGILHSRTVIKDLINADDVDEISLVDNATTAAAIVLQQIGRAFAEGNFAKNDTVLMLHCAYQAVKKSIQAYVTRAGGSVIEIQLPFPVTSNEEIISEFKRGIEKGKANGKKIRLAIIDHITSMPCVVIPVKELVKICREEGVDQVFVDAAHAIGSVEINVKEIGADFYVSNLHKWFFCPPSVAFLYCKK

SEQ ID NO: 282 - protein, 273 aa, Artificial sequence
  motif 12
HSRTVIKDLINADDVDEISLVDNATTAAAIVLQQIGRAFAEGNFAKNDTVLMLHCAYQAVKKSIQAYVTRAGGSVIEIQLPFPVTSNEEIISEFKRGIEKGKANGKKIRLAIIDHITSMPCVVIPVKELVKICREEGVDQVFVDAAHAIGSVEINVKEIGADFYVSNLHKWFFCPPSVAFLYCKKAASLEFDVHHPVVSHEYGNGLPIESAWIGTRDYSSQLVVPAALEFVNRFEDGIQGIMKRNHEEVVKMGKMLAESWGTNLGSSPEMCAG

SEQ ID NO: 283 - protein, 265 aa, Artificial sequence
  motif 13
CPGSVLAAQKNWQLQFLQQPDDFYFNTLRKGILHSRTVIKDLINADDVDEISLVDNATTAAAIVLQQIGRAFAEGNFAKNDTVLMLHCAYQAVKKSIQAYVTRAGGSVIEIQLPFPVTSNEEIISEFKRGIEKGKANGKKIRLAIIDHITSMPCVVIPVKELVKICREEGVDQVFVDAAHAIGSVEINVKEIGADFYVSNLHKWFFCPPSVAFLYCKKAASLEFDVHHPVVSHEYGNGLPIESAWIGTRDYSSQLVVPAALEFVN

SEQ ID NO: 284 - DNA, 774 bp, Medicago truncatula
atgagtcacgcgcattctcatatcggctccggtagtagaactactcgacgaacttttgaattcgggaagacacatgtagtgaggcctaaaggaaaacatcaagctactatagtttggttgcatggacttggtgataatggtttgagctcatctcagttgttggaatcacttccacttccaaatataaaatggatttgccctactgctcctacccgtcccgtggcgatacttggtggttttccctgcactgcatggtttgatgtgggagagctttcggaagatggtccagatgattgggagggtttagatgcttcagcagcacatattgctaacttgttgtcaacagagccagcagatgtgaaagttggtattggagggttcagcatgggtgcagcaatagcattatactctgcaacatgctatgccatgggaaggtatggaaatggcatcccatatcctgtcaatttaagagcagttgttggactcagtggttggcttccaggatcaaggagcttagggaacaagatagaagtgtcacatgaagcgagaaggcgagctgcttcattaccaattttacagtgtcacggaatcagtgatgatgtagtccactgtaagtatggagagaaatctgctcaatcattaagttcagcagggtttcgatatgttgcattcaaatcctatgaagggattggtcattacacagttccaagagagatgggtgaagtttccacctggcttagttcaaggttgggacttgaaggattttcgtcgtaa

SEQ ID NO: 285 - protein, 257 aa, Medicago truncatula
MSHAHSHIGSGSRTTRRTFEFGKTHVVRPKGKHQATIVWLHGLGDNGLSSSQLLESLPLPNIKWICPTAPTRPVAILGGFPCTAWFDVGELSEDGPDDWEGLDASAAHIANLLSTEPADVKVGIGGFSMGAAIALYSATCYAMGRYGNGIPYPVNLRAVVGLSGWLPGSRSLGNKIEVSHEARRRAASLPILQCHGISDDVVHCKYGEKSAQSLSSAGFRYVAFKSYEGIGHYTVPREMGEVSTWLSSRLGLEGFSS

SEQ ID NO: 286 - DNA, 768 bp, Arabidopsis thaliana
atgagctattctcgtcaaagcatgggttctggtagtagaagtacaaggggctatgagtttggaaggacttatgttgtgaggcctaaaggaaagcaccaagctactattgtttggttgcacggtcttggagacaatggctccagctcgtctcagctattggaaagcctacctcttccaaacatcaaatggatttgtccaactgctccttcgcgtcctgtttcgcttctcggtggatttccttgcactgcctggtttgacgtgggagaaatttctgaggatcttcatgatgatatagaaggcttagatgcttcagctgcacatattgctaacctattatctgctgagccaacagatgtcaaagttgggataggaggtttcagtatgggtgcagcaatagctctctactccacgacgtgctacgctcttggacgttatggaaccggacatgcttatactataaacctacgagctactgtaggacttagcggttggcttcctggttggaggagcttaaggagcaaaatagaaagttcgaatgaggttgcaaggcgcgctgcatcgataccgatcttacttgcacatggaacttcggacgatgtagttccttatagatttggagaaaaatctgctcattcacttgccatggctggattccgacaaactatgttcaaaccatatgaagggcttggtcactatacggttcctaaagaaatggatgaggtggttcactggctcgtctcaaggcttggtctcgagggttcgcgttaa

SEQ ID NO: 287 - protein, 255 aa, Arabidopsis thaliana
MSYSRQSMGSGSRSTRGYEFGRTYVVRPKGKHQATIVWLHGLGDNGSSSSQLLESLPLPNIKWICPTAPSRPVSLLGGFPCTAWFDVGEISEDLHDDIEGLDASAAHIANLLSAEPTDVKVGIGGFSMGAAIALYSTTCYALGRYGTGHAYTINLRATVGLSGWLPGWRSLRSKIESSNEVARRAASIPILLAHGTSDDVVPYRFGEKSAHSLAMAGFRQTMFKPYEGLGHYTVPKEMDEVVHWLVSRLGLEGSR

SEQ ID NO: 288 - DNA, 708 bp, Arabidopsis thaliana
atggcggcttctagtagtagaaatggagcaaatgtacttgacttaaaatgcagtcattttgtggaacctcaaggagatcaaagggccagtatagtatggctgcatgataaggatgagcatttcactgattcagtgcagtttgtgaaaagtttaaaacttaaaaatgtcaactggatttgtccacctatcgtctacacaaatacatcgtacgacttcggatctaatatcaaacaagatgatcgagaggcattagattccgcagctaaatttgttgctgatcttttattgcgtgaaccactaaatgtcgtaaaaggagtaggaggctttggcatgggtgcagtagtagctctccaatttgcaacaaattgtgctcttggacattatcctataaatccccgagttgttgttggaattaatgggtggctttctattacggggagcataacaagcagcatagaatatacagttggggctgtagctcgtgctgcatcacagaaaatcttttttacacgtggagcagagaatcgtctacttccttacacccgtgaagaagaagttgttgagtcccttagagaggctggttttggagacgtctttttcttaatatactcatggcttcgacatgaacatcatttagacatcagagatatgctcaaactctggctggaactgagtctcccaatcaccaaaacttcacctctacgataa

SEQ ID NO: 289 - protein, 235 aa, Arabidopsis thaliana
MAASSSRNGANVLDLKCSHFVEPQGDQRASIVWLHDKDEHFTDSVQFVKSLKLKNVNWICPPIVYTNTSYDFGSNIKQDDREALDSAAKFVADLLLREPLNVVKGVGGFGMGAVVALQFATNCALGHYPINPRVVVGINGWLSITGSITSSIEYTVGAVARAASQKIFFTRGAENRLLPYTREEEVVESLREAGFGDVFFLIYSWLRHEHHLDIRDMLKLWLELSLPITKTSPLR

SEQ ID NO: 290 - DNA, 771 bp, Glycine max
atgagtcatgcacattctcatatgggctcaggtagtagaaccactcgaagagctttcgagtttgggaaaacacatgtagtgaggccaaaaggaaaacatcaagccactatagtttggctgcatggtcttggtgataatggtttgagctcatctcagctcctggaatccttgccacttccaaatataaaatggatttgccctactgctcctacccgtcctgtggcgatacttggtggttttccctgcactgcatggtttgatgtgggagaactttcagaagatggtccagatgattgggagggtttagatacctcggcagcacacattgctaacttgttgtcaacagagccagctgatgtgaaagttggtattggaggcttcagcatgggtgcagccatagccctgtactctgcaacttgttttgccatgggaaggtatggaaatggcataccataccctctaaacttaagaacagtggttggactaagtggttggcttcccggatcaaggagcttaaggaacaagatagaagtgtcacatgaggcaagaaggcgagcagcttcattacccattttgctgtgccatggaatcagtgatgatgtagtcctttacaaatacggagaaaaatctgctcaatccttatgttcagcagggtttcgatatgttgcattcaaatcctatgatgggcttggtcattacacggttcctagagagatggatgaggtttgcacttggtttagttcaagattgggacttgatgggtcctcgtaa

SEQ ID NO: 291 - protein, 256 aa, Glycine max
MSHAHSHMGSGSRTTRRAFEFGKTHVVRPKGKHQATIVWLHGLGDNGLSSSQLLESLPLPNIKWICPTAPTRPVAILGGFPCTAWFDVGELSEDGPDDWEGLDTSAAHIANLLSTEPADVKVGIGGFSMGAAIALYSATCFAMGRYGNGIPYPLNLRTVVGLSGWLPGSRSLRNKIEVSHEARRRAASLPILLCHGISDDVVLYKYGEKSAQSLCSAGFRYVAFKSYDGLGHYTVPREMDEVCTWFSSRLGLDGSS

SEQ ID NO: 292 - DNA, 771 bp, Glycine max
atgagctatccacattatcatatgggctctggtagtagaactgctaggagaagcttggagtttgggaagacacatgtggtgaggccaaaaggaaaacaccaagctactatagtttggctgcatggtcttggtgacaatggtttgagctcttatcagctgctggaatctcttccacttccaaatataaaatggatttgcccaactgctcctacccgtcctgtaaccatacttggtggtttttcttgcactgcatggtttgatatgggagaactttcagaagatggtccagatgattgggagggtttagatgcctcagcatcacatattgccaacttgttgtcaacagagccagctgatgtgaaagtaggaattggaggcttcagtatgggtgctgcagtagctcaatactctgcaacttgttttgccatgggaaggtatggaaatggcatcccttaccctgtcaacctaagagcagttgttggactcagtggctggcttccaggatcaaggagcttaaggaacaaaattgaagtgtcacatgaagcaagaaggcgagctgcttcgttacctgttttgctgagccatggaatcagtgatgatgtagtcctctacaaatacggagagaaatcagctcaatccttaagttcagcagggtttcgatacattacattcaaatcctatgatgggcttggtcattataccgttcctagggagatggatgaggtctctaattggcttagctcaaggctggggcttgggggatccacatga

SEQ ID NO: 293 - protein, 256 aa, Glycine max
MSYPHYHMGSGSRTARRSLEFGKTHVVRPKGKHQATIVWLHGLGDNGLSSYQLLESLPLPNIKWICPTAPTRPVTILGGFSCTAWFDMGELSEDGPDDWEGLDASASHIANLLSTEPADVKVGIGGFSMGAAVAQYSATCFAMGRYGNGIPYPVNLRAVVGLSGWLPGSRSLRNKIEVSHEARRRAASLPVLLSHGISDDVVLYKYGEKSAQSLSSAGFRYITFKSYDGLGHYTVPREMDEVSNWLSSRLGLGGST

SEQ ID NO: 294 - DNA, 786 bp, Glycine max
atgagctatccacattatcatatgggctctggtagtagaactgctagcagaagcttggagtttgggaagacacatgtggtgaggccaaaaggaaagcaccaagctactatagtttggctgcatggtcttggtgataatggtttgagctcttatcagctgctggaatctcttccacttccaaatataaaatggatttgcccaactgctccttctcgccctgtaaccatacttggtggtttttcttgcactgcatggtttgatatgggagagctttcagaagatggtccagttgattgggagagtttagatgcctcagcatcacatattgccaacttgttgtcaacagagccagctgatgttcaatttgtcacagtgaaagtaggaattggaggcttcagtatgggtgctgcagtagctcaatactctgcaacttgttttgccatgggaaggtatggaaatggcatcccttaccctgtcaacttacgagcagttgttggactcagtgggtggcttccaggatcaaggagcttaaggaacaagattgaagtgtcacatgaagcaagaaggcgagctgctttgttacctgttttgctgagccatggaatcagtgatgacgtagttctctacaaatacggagagaaatcagctcaatccttaagttcagcagggtttcgatacattacattcaaatcctatgatgggcttggtcattatactgttcctagggagatggatgaggtctccaattggcttagctcaaggctggggctagggggatccacatga

SEQ ID NO: 295 - protein, 261 aa, Glycine max
MSYPHYHMGSGSRTASRSLEFGKTHVVRPKGKHQATIVWLHGLGDNGLSSYQLLESLPLPNIKWICPTAPSRPVTILGGFSCTAWFDMGELSEDGPVDWESLDASASHIANLLSTEPADVQFVTVKVGIGGFSMGAAVAQYSATCFAMGRYGNGIPYPVNLRAVVGLSGWLPGSRSLRNKIEVSHEARRRAALLPVLLSHGISDDVVLYKYGEKSAQSLSSAGFRYITFKSYDGLGHYTVPREMDEVSNWLSSRLGLGGST

SEQ ID NO: 296 - DNA, 768 bp, Arabidopsis thaliana
atgagttactctcatcaaagcatgggttctggtagtagaaatgcaaggggatatgaatttggaaggacttatgttgtgaggcctaaaggaaagcatcaagccactctagtctggcttcatggtcttggtgacaatggctctagttcatctcagctcatggacagcttgcatcttccaaatataaaatggatttgtccaaccgctccttcgcgtcctgttacaagtcttggtggatttacatgcactgcttggtttgacgttggggaaatttctgaagatggtcatgatgatttggaaggtttagatgcctcagcttcacatattgctaaccttttgtcctctgaaccagcagatgttaaagtaggcataggaggttttagcatgggagcagcaatatctctctactccgcgacttgttatgctcttggacgttatggaactggccatgcgtatcctataaacctacaagctgttgtaggactcagcggctggcttcctggttggaagagcttaaggagcaaaatagaatgttcatttgaggctgcaaggcgtgctgcatcgttaccaattatacttacacatggaacttccgatgatgtggttccttataggtttggagagaaatctgcgcagtctcttggcatggctggatttcgactagccatgtttaaaccatacgaaggacttggtcattataccgttcccagagaaatggatgaggtcgttcactggctcacaacgatgctcggacttgagggctcgcgctaa

SEQ ID NO: 297 - protein, 255 aa, Arabidopsis thaliana
MSYSHQSMGSGSRNARGYEFGRTYVVRPKGKHQATLVWLHGLGDNGSSSSQLMDSLHLPNIKWICPTAPSRPVTSLGGFTCTAWFDVGEISEDGHDDLEGLDASASHIANLLSSEPADVKVGIGGFSMGAAISLYSATCYALGRYGTGHAYPINLQAVVGLSGWLPGWKSLRSKIECSFEAARRAASLPIILTHGTSDDVVPYRFGEKSAQSLGMAGFRLAMFKPYEGLGHYTVPREMDEVVHWLTTMLGLEGSR

SEQ ID NO: 298 - DNA, 777 bp, Glycine max
atgagcttcgctgcaccatcacttggttctgctggtggtagatctgctagaagagcatttgagtttgggagaacctatgttgtcaggcctaaaggtaaacaccaagcaactatagtctggttgcatggcctcggggataatggctccagttggtcccagctattagagacccttcctcttccaaatattaaatggatatgtccgactgctcctactcagccaatatctatatttggtggctttccgtctactgcttggtttgatgttggagatatttcagaagatgctcctgatgatctagaaggtttggatgcttcagctgcacatgttgcgaatttgctgtctacagaacctgcagacattaagcttggtgttggagggttcagtatgggtgcagctactgccctgtactctgtgtcctgctttactgctggaaaatatgggaatggcaatccttatccagccaacccaagtgcagctgttggtttaagtggctggcttccgtgctcaaagaccttgagtaacaagttacaaggggtagatgaagctacaaggcgtgctcagtcctttcctgttttgctgtgtcatggaaaagttgacgatgttgttccttataagtttggtgagaaatcatcgaagtgcttaagttcaactggatttcaggatgtaacttttaaagcttataatgggcttggacactacaccattccagaagagatggatgaggtttgtgcttggctaacatcaaaattgagccttgaggggaatactgcttag

SEQ ID NO: 299 - protein, 258 aa, Glycine max
MSFAAPSLGSAGGRSARRAFEFGRTYVVRPKGKHQATIVWLHGLGDNGSSWSQLLETLPLPNIKWICPTAPTQPISIFGGFPSTAWFDVGDISEDAPDDLEGLDASAAHVANLLSTEPADIKLGVGGFSMGAATALYSVSCFTAGKYGNGNPYPANPSAAVGLSGWLPCSKTLSNKLQGVDEATRRAQSFPVLLCHGKVDDVVPYKFGEKSSKCLSSTGFQDVTFKAYNGLGHYTIPEEMDEVCAWLTSKLSLEGNTA

SEQ ID NO: 300 - DNA, 771 bp, Populus trichocarpa
atgagttttgctggtccttccctggcttctggtggtaaaactgttagaagagctatagaattcggaaggacttatgtggttaagcccaaaggtaaacaccttgccactgttgtttggctacatgggcttggcgataatggctcaagctggtcacagctcttggagactcttcctcttccaaatattaaatggatatgcccaactgcaccgactcaacctgtaactgtattcgggggtttcccatcaacagcttggtttgatgtgggagacctttcagaagatgctcctgatgatacagagggtctggatgctgcagcagcacatgtggcaaatttgctgtcaacagagccctttgacattagacttggaattggaggcttcagcatgggtgctgcaactgctatgtattctgctacctgctttgctgctggaaagtactcagatggcagtgcataccctgccaatttgagtgcaattgttggattaagtggctggcttccatgttcaaagaccctgagtaagaaaataggaggggatgaaaccgcaaggcgtgctgcttccttgcctatattgctctgtcatggcaaaggtgatgatgtggttccttacaaatttggtgaaaaatcctcacgggttttggtttcaactggattccaggatgcaacattcaaagcatacaatgggcttggtcactacacaatccctgaagagatggatgaggtttgtgcttggcttacttctaagttggggcttggagggcgttctccatga

SEQ ID NO: 301 - protein, 256 aa, Populus trichocarpa
MSFAGPSLASGGKTVRRAIEFGRTYVVKPKGKHLATVVWLHGLGDNGSSWSQLLETLPLPNIKWICPTAPTQPVTVFGGFPSTAWFDVGDLSEDAPDDTEGLDAAAAHVANLLSTEPFDIRLGIGGFSMGAATAMYSATCFAAGKYSDGSAYPANLSAIVGLSGWLPCSKTLSKKIGGDETARRAASLPILLCHGKGDDVVPYKFGEKSSRVLVSTGFQDATFKAYNGLGHYTIPEEMDEVCAWLTSKLGLGGRSP

SEQ ID NO: 302 - DNA, 771 bp, Triticum aestivum
atgagcttcggcggcgccagctccgtcgcggccggtgggaagcggccgttcgagtacgggaggacgcatgtggtgaggcccaagggcgcgcacaaggccaccatcgtctggctccacggcctcggcgacaatggagccagctggtctcaactgttggaaactcttccccttcctaatataaaatggatctgcccaactgcacctacgaggcctgtggcaatttttggtggattcccatctactgcatggtttgatgttgctgatctttcagaagattctcctgatgatgttgaggggctggattcctcagctgcacatgttgcaaatttattgtctaccgaacctgcagacatcaagcttggcgttggtggctttagtatgggtgctgctactgcgctttactccggtacttgctttgctcatggaaaatatggaaatggcaatccataccctgtgaacctaagtgtggctgttggtctcagtggctggctcccatgtgccaggtcattgaagaacaaaattgagagctcacaggaggctgcacagaaggcttcatcattacctcttatgctttgtcatggaaaagctgatgatgtggtcctctacaaacatggagagagatctgctgatgcacttaagtcaaccgggtttgcaaatgtggaattcaagtcctacagcagactcgggcactataccgttccagaggagatggacgaagttgtcaagtggcttacagcaagcttggaactcggcagttcatcgtcaacttga

SEQ ID NO: 303 - protein, 256 aa, Triticum aestivum
MSFGGASSVAAGGKRPFEYGRTHVVRPKGAHKATIVWLHGLGDNGASWSQLLETLPLPNIKWICPTAPTRPVAIFGGFPSTAWFDVADLSEDSPDDVEGLDSSAAHVANLLSTEPADIKLGVGGFSMGAATALYSGTCFAHGKYGNGNPYPVNLSVAVGLSGWLPCARSLKNKIESSQEAAQKASSLPLMLCHGKADDVVLYKHGERSADALKSTGFANVEFKSYSRLGHYTVPEEMDEVVKWLTASLELGSSSST

SEQ ID NO: 304 - DNA, 768 bp, Zea mays
atgagcttcggcggcagcagctccctcgcatcaggtgcgaagaggccgttcgagtacgggagaacgcatgtggtgaggcccaagggcacgcacaaggccaccattgtctggctccatggacttggggacaatggagccagctggtctcaactactggaaactcttccccttcctaatataaaatggatatgccccactgcaccttcaagacccgtgtcattgtttggcgggttcccctccacagcatggtttgatgttgctgatctttctgaggatgctcctgatgacattgaggggatggatgcctcagcagcacatgttgcgaatttgttgtcaactgaacccgctgacatcaaacttggtgttggtggctttagtatgggtgctgctactgctctgtactctgcaacttgctttgctcatggaaaatatgggaacggcaatccataccctgtgaacctaagtcttgccgttggtcttagtggctggcttccatgtgccaggaccttgaagaacagaattgaagcctcaccagaggctgcacaaagggcttcaacaatacctcttttgctctgtcatggaaaagctgatgatgtagttctctacaagcacgggcagagatctactgatgccttgaaggcaaatggcttttccaatgtgctcttcaagtcatacaatagtcttggtcactacactgttccagaggagatggatgaagtttgcaaatggctcacagcaaatttggggctcggcacttcgtcatcttga

SEQ ID NO: 305 - protein, 255 aa, Zea mays
MSFGGSSSLASGAKRPFEYGRTHVVRPKGTHKATIVWLHGLGDNGASWSQLLETLPLPNIKWICPTAPSRPVSLFGGFPSTAWFDVADLSEDAPDDIEGMDASAAHVANLLSTEPADIKLGVGGFSMGAATALYSATCFAHGKYGNGNPYPVNLSLAVGLSGWLPCARTLKNRIEASPEAAQRASTIPLLLCHGKADDVVLYKHGQRSTDALKANGFSNVLFKSYNSLGHYTVPEEMDEVCKWLTANLGLGTSSS

SEQ ID NO: 306 - DNA, 699 bp, Hordeum vulgare
  misc_feature (366)..(366): n is a, c, g, or t
atgagcttcagcggcgcctgctccgtcccggccggtgcgaagcggtcgttccagtactggaggactcatgtggcgaggcccaacggggcgcacaaggccaccatcgtgtggcttcacggcctcggctacaatggagccagctggtctcaactgttggaaactcttcccctttctaatattaaatggatttgcccagctgctcctaccaggcccgcggcaattgatggtggattcccatctactgcatggtctgacgttgctgatctttcagaacattctcctgatgatgttgaggggctggattcctcagctgcacatgtggcagatctattgtctaccgagcctgcagacatcaagcttggtgtnggtggctttagtatgggtgctgctactgcgctttactccggtacttgctttgctcatggaaaatatggaaatggccatccataccctgtaaacctagatgtggctgatgggctcagtggctggctcccctgtgccaggtcattggcgaacaaaattgaaagctcacaggaggctgcacagaacgctgcatcattaccttttatgctttgtcatggaaaagctgatgatgtggtcctgtaacaacatggcaagaggactgctgatgcccttaaactcaccggggtttgccaagttgtaattcaggccttaaggatggctcgggccctataccct

SEQ ID NO: 307 - protein, 232 aa, Hordeum vulgare
MSFSGACSVPAGAKRSFQYWRTHVARPNGAHKATIVWLHGLGYNGASWSQLLETLPLSNIKWICPAAPTRPAAIDGGFPSTAWSDVADLSEHSPDDVEGLDSSAAHVADLLSTEPADIKLGVGGFSMGAATALYSGTCFAHGKYGNGHPYPVNLDVADGLSGWLPCARSLANKIESSQEAAQNAASLPFMLCHGKADDVVLQHGKRTADALKLTGVCQVVIQALRMARALYP

SEQ ID NO: 308 - DNA, 768 bp, Helianthus annuus
atgagcttcagcggcccttctgttggtaccggtggtagagctgccagaagggcatttgagtttggacggacgtatgtggtgaaacctaaaggcaaacaccaggcaaccattgtctggttgcatggcctcggtgataatggttcaagctggtcacagctcttggagacgcttccacttccaaatatcaaatggatatgccctacatcacctgcacaaccactaaccttatttggcggctttcccacaactgcatggtttgatgtaagtgacctgtctgaagatgcacatcaagatgaagaagggatggatgcttcagcagcacacgttttgagtctgctctctaccgagccccctaatatcaaacttggtgttggaggctttagtatgggggcggcaaccgctctatactctgcaagttgttttactcatgggaagttcgggaatggaaacgcgtactctactcatttggatgcggttgttggacttagtggctggcttccatgtgcaaaagacctgagtaagaagatcgaaggggaggaagctgcaaatcgtgcttcatcgttgcctattttgctatgtcatggcaaagctgatgatgtggtacgctttcgttttggggagaagtcagcccagaaactatcttccaccggcttcaaaaacctgacattcaaagcctatgactcgcttggccattacacaattccagaagagatggacgaggtttgttcatggctaacttcgaaactagagctggaaggtaagttgtaa

SEQ ID NO: 309 - protein, 255 aa, Helianthus annuus
MSFSGPSVGTGGRAARRAFEFGRTYVVKPKGKHQATIVWLHGLGDNGSSWSQLLETLPLPNIKWICPTSPAQPLTLFGGFPTTAWFDVSDLSEDAHQDEEGMDASAAHVLSLLSTEPPNIKLGVGGFSMGAATALYSASCFTHGKFGNGNAYSTHLDAVVGLSGWLPCAKDLSKKIEGEEAANRASSLPILLCHGKADDVVRFRFGEKSAQKLSSTGFKNLTFKAYDSLGHYTIPEEMDEVCSWLTSKLELEGKL

SEQ ID NO: 310 - DNA, 741 bp, Brassica napus
atgagtatctctggcgctgcacttggttcaggaagaattttaggaagagcggtagagtttgggaaaactcatgtggttaggcccaaagggaaacaccaagctactattgtctggttacatggtcttggcgacaatggctctagctggtctcagcttttggagacccttccccttcccaatatcaaatggatatgcccaactgctccttctcaacctataagtttatttggtgggtttgatgttgtgggcatcaatgaagatggacctgatgatgtagaaggactggacgtggctgccgcacatgttgcaaatttgttgtcgaatgagccttctgacattaagttaggtgttggagggttcagcatgggtgcggggacgtctctatactcagcgacttgttttgctaccggtaaatatggaaatggcaatccttaccctatcaatttaagcaccgtcataggcttaagcggttggcttccttgtgctaagacactggctggcaaactagaagaggaacagatcaagaaccgagctgcgtccttaccaattttagtttgtcatggaaaaggtgatgatgtggtaccgtacaagtttggggagaaatcttcagaggccttgatatcacatgggtttaagaagacaacgttcaaagcctacagtggacttggtcactacaccatcccacaggagatggatgagttgtgcgcgtggttaacatccaacctcggcctccaaggttga

SEQ ID NO: 311 - protein, 246 aa, Brassica napus
MSISGAALGSGRILGRAVEFGKTHVVRPKGKHQATIVWLHGLGDNGSSWSQLLETLPLPNIKWICPTAPSQPISLFGGFDVVGINEDGPDDVEGLDVAAAHVANLLSNEPSDIKLGVGGFSMGAGTSLYSATCFATGKYGNGNPYPINLSTVIGLSGWLPCAKTLAGKLEEEQIKNRAASLPILVCHGKGDDVVPYKFGEKSSEALISHGFKKTTFKAYSGLGHYTIPQEMDELCAWLTSNLGLQG

SEQ ID NO: 312 - DNA, 759 bp, Brassica napus
atgagtatctctggtgctgcacttggttcaggaagaattttaggaagagcggtagagtttgggaaaactcatgtggttaggcccaaagggaaacaccaagctactattgtctggttacatggtcttggcgacaatggctctagctggtctcagcttttggagacccttccccttcccaatatcaaatggatatgcccgactgctccttctcaacctataagtttatttggtggttttccctccacagcttggtttgatgttgtgggcatcaatgaagatggacctgatgatgtagaaggactggacgtggctgccgcacatgttgcaaatttgttgtcgaatgagccttctgacattaagttaggtgttggagggttcagcatgggtgcggggacgtctctatactcagcgacttgttttgcagtcggtaaatatggaaatggcaatccttaccctatcaatttaagcacagccataggcttaagcggttggcttccttgtgttaagacactggctggcaaactagaagaggaacagatcaagaatcgagctgcgtccttaccaattttagtttgccatggaaaaggtgatgatgtggtgccgtacaagtttggggagaaatcttcagaggccttgatatcacatgggtttaagaagacaacgttcaaagcctatagtggacttggtcactacaccatcccacaggagatggatgagttgtgcgcttggttaacatccaacctcggcctccaaggttga

SEQ ID NO: 313 - protein, 252 aa, Brassica napus
MSISGAALGSGRILGRAVEFGKTHVVRPKGKHQATIVWLHGLGDNGSSWSQLLETLPLPNIKWICPTAPSQPISLFGGFPSTAWFDVVGINEDGPDDVEGLDVAAAHVANLLSNEPSDIKLGVGGFSMGAGTSLYSATCFAVGKYGNGNPYPINLSTAIGLSGWLPCVKTLAGKLEEEQIKNRAASLPILVCHGKGDDVVPYKFGEKSSEALISHGFKKTTFKAYSGLGHYTIPQEMDELCAWLTSNLGLQG

SEQ ID NO: 314 - DNA, 759 bp, Arabidopsis thaliana
atgagtatctccggtgctgcagttggttcaggcagaaatttaagaagagcggtagagtttgggaaaactcatgtggttaggcctaaagggaaacatcaagcaactattgtctggttacatgggcttggggacaatggctcgagctggtcccagcttttggagacccttccccttccaaatatcaaatggatttgcccgactgctccttctcaaccaataagtttatttggtggttttccctccacagcttggtttgatgttgtggacatcaatgaagatggacctgatgatatggaaggattggatgtggctgctgcacatgttgcaaatctgttgtcgaatgagcctgctgacattaaattaggtgttggaggattcagcatgggtgcggcgacatctctatattctgcaacttgttttgctctcggtaaatatggaaatggcaatccataccctatcaatttaagcgcaatcataggcttaagcggctggcttccttgtgcaaagacattggctggcaaactagaagaggaacagatcaagaaccgagctgcatcgttgcccattgttgtctgtcatggaaaagctgatgatgtggtaccgttcaagtttggggagaaatcttcacaggctttgctttcaaatgggtttaagaaggtgaccttcaaaccttacagtgcacttggtcaccacacaatcccacaggagttggatgagttgtgcgcatggttgacatccacgctcagcctcgaaggttga

SEQ ID NO: 315 - protein, 252 aa, Arabidopsis thaliana
MSISGAAVGSGRNLRRAVEFGKTHVVRPKGKHQATIVWLHGLGDNGSSWSQLLETLPLPNIKWICPTAPSQPISLFGGFPSTAWFDVVDINEDGPDDMEGLDVAAAHVANLLSNEPADIKLGVGGFSMGAATSLYSATCFALGKYGNGNPYPINLSAIIGLSGWLPCAKTLAGKLEEEQIKNRAASLPIVVCHGKADDVVPFKFGEKSSQALLSNGFKKVTFKPYSALGHHTIPQELDELCAWLTSTLSLEG

SEQ ID NO: 316 - DNA, 762 bp, Brassica napus
atgagtctctctggtgctgctgcagttggttcaagcagaaacttgaaaaaagcggtggagtttgggaaaactcatgtggttaagcccaaagggaaacaccaagctactattgtctggctacatggccttggcgacaatggctccagctggtcccagattttggagacccttcctcttccgaatatcaaatggatctgccctacagctccttctcaaccaataagtctgtttggtggttttccctccacagcttggtttgatgttgtggacctcactgagaatggacctgatgatgtagaaggactggatgtggctgccgcacatgttgcaaatctgttggcaaatgagcctgctgacattaagttaggtgttggagggttcagcatgggggcagggacgtctctgtattctgcgacttgttttgcccttggcaaatatggaaatggcaatccttaccctatcaatttaagcgcagtcattggcttaagcgggtggcttccttgtgctaagacactgactggtaaactagaagaggagcagatcaagaaccgggctgcatcgttacccatcttagtttgtcatggaaaaggtgatgatgttgtaccgttcaagtttggggagaaatcttcacaggccttgttatcacatgggtttaagaagacgaccttcaaagcttacggtgcacttggtcactacacaatcccacaggagacggaggatgtatgcgcgtggttgacatccaccctcggcctcgaaggttga

SEQ ID NO: 317 - protein, 253 aa, Brassica napus
MSLSGAAAVGSSRNLKKAVEFGKTHVVKPKGKHQATIVWLHGLGDNGSSWSQILETLPLPNIKWICPTAPSQPISLFGGFPSTAWFDVVDLTENGPDDVEGLDVAAAHVANLLANEPADIKLGVGGFSMGAGTSLYSATCFALGKYGNGNPYPINLSAVIGLSGWLPCAKTLTGKLEEEQIKNRAASLPILVCHGKGDDVVPFKFGEKSSQALLSHGFKKTTFKAYGALGHYTIPQETEDVCAWLTSTLGLEG

SEQ ID NO: 318 - DNA, 669 bp, Helianthus annuus
atgagtctcagtggcccttccggtggtagaactggaagaaggacacttgagttcggaaagacatatgtggtaaaacctaaaggcaaacaccttgcaaccattgtgtggttgcatggccttggtgacaatggctcgagttgggcccagcttttggatacccttcctcttccaaacatcaaatggatatgccctacttctccttctcaacccttgaccttatttggtggctttccgtcaaatgcatggtttgatgtgagtgacctgtctgaagatgcaaaacaagacgtagagggtcttgattcttcagctgcacatgttttaagtctactctcgactgagcccgcagacgtcaaacttggtgtaggaggcttcagtatgggtccagcacttgctttgtactctgcggtttcctttgctaatggaaaacttgggaatggcgattctttctcagcccgtttggatgcagttgtaggccttagtggctggcttccatgtgcaaaggatctaacgaacaaggtagaaagtgatgaagctgcagcccgagcatcgtccttgcctattttgctttgtcatggcaaagctgatgatgtggttctcttccgatacggtgacaagtcagctgaagaaactaacttcgaccggcttccaaaacttgaccttcaaaactaa

SEQ ID NO: 319 - protein, 222 aa, Helianthus annuus
MSLSGPSGGRTGRRTLEFGKTYVVKPKGKHLATIVWLHGLGDNGSSWAQLLDTLPLPNIKWICPTSPSQPLTLFGGFPSNAWFDVSDLSEDAKQDVEGLDSSAAHVLSLLSTEPADVKLGVGGFSMGPALALYSAVSFANGKLGNGDSFSARLDAVVGLSGWLPCAKDLTNKVESDEAAARASSLPILLCHGKADDVVLFRYGDKSAEETNFDRLPKLDLQN

SEQ ID NO: 320 - DNA, 777 bp, Medicago truncatula
atgagcaacagaaacttctcagctagttctggtagtggaaatgctagcaggacatttgagtttggaaggactcatgtggttagacctaaagggaagcatcaagcaactattgtttggctacatggtattggcgataacggctcgagctggtcccaactattggaaactcttcctcttccaaatattaaatggatttgtccaactgctcctacgcggcctgtagccttatttggtggatttccttgcactgcttggtctgatgttggtgatatttcagaagacgctcctaatgatttggagggtttagatgcttctgcagcacatgttgccaatcttttgtcaacagagcctccaaatatcatactcggtattggtggcttcagtaatggtgctgcaactgcactgtactcagctacatgtcatgttctgggacactatggaaatggaaacatttaccctattaacttaagcgcaattgtttcattaagtggctggcttccttgttcaaggaccttaagaaaccagatcggaggatcacgtgatggtataaggcgtgcaacatcgttgcccttatttatcggccatggaagcgctgatgatgtggttgcatatgaacatggagagaattctgcaaggaccttaagctcagctggattccagaatcttatattcagaagctacaatgggttaggtcactatacagttcctgaagagactgatgaagtttgcagatggctaactgcaaatttggcacttgaggggttaaggttgaactag

SEQ ID NO: 321 - protein, 258 aa, Medicago truncatula
MSNRNFSASSGSGNASRTFEFGRTHVVRPKGKHQATIVWLHGIGDNGSSWSQLLETLPLPNIKWICPTAPTRPVALFGGFPCTAWSDVGDISEDAPNDLEGLDASAAHVANLLSTEPPNIILGIGGFSNGAATALYSATCHVLGHYGNGNIYPINLSAIVSLSGWLPCSRTLRNQIGGSRDGIRRATSLPLFIGHGSADDVVAYEHGENSARTLSSAGFQNLIFRSYNGLGHYTVPEETDEVCRWLTANLALEGLRLN

SEQ ID NO: 322 - DNA, 774 bp, Oryza sativa
atgagcagcttcggcggcaccagctccgtcgcctccggtggtgggaagaggctcgagtacgggcggacgcatgtcgtgaggcccaagggcgcgcacaaggccaccatcgtctggctccacggcctcggggacaacggagccagctggtctcaactactggaaacccttccccttcccaatataaaatggatttgccccaccgcgcctacaaggccagtggcagtttttggtgggttcccatcaactgcatggtttgatgttgctgatctttcagaagacgctcctgatgatgttgaggggttggatgcctcagctgcacatgttgcaaacttattatcaactgagccagctgacatcaaacttggtgttggtggctttagcatgggcgcagctaccgccctttactctgcaacctgctatgctcatggaaaatacggaaatggcaatccatatcctgtgaacttaagtgtgtctgttggtctcagtggctggcttccttgtgccaggtctttgaagaacaaaattgaaagctcacaggaggctgcacaaaaggcttcatccatacctcttttgctttgtcatggaaaagctgatgatgtagttctctacaagcatggtgagaaatctgctgacgcactgaagacaactggattttcaaatgtggtgttcaagtcctacaacagacttggacactacactgttccggaggagatggatgaagtctgcaaatggctcaccgcgaacttgggggtcagcagctcatcgtcggcttga

SEQ ID NO: 323 - protein, 257 aa, Oryza sativa
MSSFGGTSSVASGGGKRLEYGRTHVVRPKGAHKATIVWLHGLGDNGASWSQLLETLPLPNIKWICPTAPTRPVAVFGGFPSTAWFDVADLSEDAPDDVEGLDASAAHVANLLSTEPADIKLGVGGFSMGAATALYSATCYAHGKYGNGNPYPVNLSVSVGLSGWLPCARSLKNKIESSQEAAQKASSIPLLLCHGKADDVVLYKHGEKSADALKTTGFSNVVFKSYNRLGHYTVPEEMDEVCKWLTANLGVSSSSSA

SEQ ID NO: 324 - DNA, 609 bp, Zea mays
atgagctacggcggcagcagctccctcgcgcccggtgccaagaggccgttcgagtacgggagaacgcatgtggtgaggcccaagggcacgcacaaggccaccattgtctggctccacggccttggtgacaatggaaccagctggtctcaactgctggaaacgcttccccttcctaatataaaatggatatgcccaactgcaccttcaagacctgtgtcattgtttggcgggttcccctgcacagcatggtttgatgttgctgacctttctgaggatgctcccgatgacactgaggggatggatgcctcagcagcacatgttgcaaatttgttgtcaactgagcccgctgatatcaagcttggtgttggtggctttagtatgggtgctgctactgctctgtactctgcaacttgctttgctcatggaaaatatgggaacggcaatccataccctgtgaacctaagtcttgccgttggtcttagtggctggcttccatgtgccaggaccttgaagaacagaattgaagcctcaccagaggctgcacaaagggcttcaacaatacctcttttgctctgtcatggaaaaggtaacactgcttcctgcccatag

SEQ ID NO: 325 - protein, 202 aa, Zea mays
MSYGGSSSLAPGAKRPFEYGRTHVVRPKGTHKATIVWLHGLGDNGTSWSQLLETLPLPNIKWICPTAPSRPVSLFGGFPCTAWFDVADLSEDAPDDTEGMDASAAHVANLLSTEPADIKLGVGGFSMGAATALYSATCFAHGKYGNGNPYPVNLSLAVGLSGWLPCARTLKNRIEASPEAAQRASTIPLLLCHGKGNTASCP

SEQ ID NO: 326 - DNA, 777 bp, Populus trichocarpa
atgagctacaatacctccgctgcaggatctggcagtaggaatactacaagaacatttgagtttggaaggacccatgtggtgaggcctaaaggaaagcaccaggccactatagtttggctgcatggccttggtgataagggctcaagctggtcccagctcttggaaacccttccccttccaaatattaaatggatatgcccaactgctccaaccaggccagtagcaatatttggtggatttccatgcactgcttggtctgatgctggggatatttcggaagatgcccctgatgatttggaggggctagatgcttcagcagcgcatgttgcaaatcttttatcgaccgagcctgctgatatgtttttatcattgtttttcagtcaaacttggtgtaggtggcttcagtatgggagctgcaaccgccctctactctgccacatgccacatttttgggcaatatgggaatggaaacctgtacccagtcaacttaagtgcaattgttggtctaagtggctggcttccatgttcaaggtttggtttcagagttctgacgtgaccttgaggaaccggatggaaagatcagatgaagctgcaagacgtgcagcatccttgcccatcttgctctgccatggctcaggtgatgatgtggttgcacataaacatggagagaaatcagcacaagcattaagttcagctggattccgtaatcttacatttagaagctataatgggtatatctatctcccactaggcattatagcatacccaactatataa

SEQ ID NO: 327 - protein, 258 aa, Populus trichocarpa
MSYNTSAAGSGSRNTTRTFEFGRTHVVRPKGKHQATIVWLHGLGDKGSSWSQLLETLPLPNIKWICPTAPTRPVAIFGGFPCTAWSDAGDISEDAPDDLEGLDASAAHVANLLSTEPADMFLSLFFSQTWCRWLQYGSCNRPLLCHMPHFWAIWEWKPVPSQLKCNCWSKWLASMFKVWFQSSDVTLRNRMERSDEAARRAASLPILLCHGSGDDVVAHKHGEKSAQALSSAGFRNLTFRSYNGYIYLPLGIIAYPTI

SEQ ID NO: 328 - DNA, 774 bp, Populus trichocarpa
atgagctacaatacctctgctgtaggttctggcagcaggaatactacaagaacatttgaatttggaagaacccatgtggtgaggcctaaaggaaagcaccaggccactatagtttggctgcacggtcttggtgataagggctcaagctggtcccagctcttggaaactcttcctcttcctaatattaaatggatatgcccaactgctccaaccaggccagtagcaatatttggtggatttccatgcactgcttggtttgatgtgggggatatttcagaagacgcccctgatgatttggaggggctagaagcttcagcaacacatgttgcgaatcttttatcgaccgagcctgctgatatcaaacttggtgtaggtggcttcagtatgggtgctgcaactgccctctactctgccacatgccatgttttagggcaatatgggaatggaaaccagtaccccatcaacttaactgcagttgttggtctaagtggctggcttccgtgttcaaggaccttgaggagccggatagaaagatcagacgaagctgcaagacgtgcagcatctttgcctatcctgctgtgtcatggctcgggtgatgatgtggttgcacataaacatggagagaaatcagcgcaggcattaagttcagctggattccgaaatcttacgtttagaagctataatgggcttggtcattacacaatccctgaagagatggatgaagtatgtcactggctaaccactaggttagggctcgacgggtcatggtcttga

SEQ ID NO: 329 - protein, 257 aa, Populus trichocarpa
MSYNTSAVGSGSRNTTRTFEFGRTHVVRPKGKHQATIVWLHGLGDKGSSWSQLLETLPLPNIKWICPTAPTRPVAIFGGFPCTAWFDVGDISEDAPDDLEGLEASATHVANLLSTEPADIKLGVGGFSMGAATALYSATCHVLGQYGNGNQYPINLTAVVGLSGWLPCSRTLRSRIERSDEAARRAASLPILLCHGSGDDVVAHKHGEKSAQALSSAGFRNLTFRSYNGLGHYTIPEEMDEVCHWLTTRLGLDGSWS

SEQ ID NO: 330 - DNA, 708 bp, Glycine max
atgagctacagtggctcctcaatgagttctggtagtggatcttctagaaggacatttgagtttggaaggacccatgtggtcagacctaaagggaaacaccaggcaactatagtttggctacatggccttggtgataatggctcaagctggtcccaactcttggaaactcttcctcttccaaatattaaatggatttgcccaactgctcctacacggcctgtagccttatttggtggatttccttgcactgcttggtttgatgctggggagatttcagaagaagctcctagtgatttggaggggttagatgcttctgcagcacacgttgccaatcttttgtcaacagagcctccaaatatcaaacttggtattgggggcttcagtatgggtgctgcaactgcactatactcagctacatgccatgttttggggcactatggtaatggaaacatttaccctatcaacttaagtgctattgtttctttaagtggctggcttccttgttcaaggactttgaaaaaccaaattgaacgatcacgtgatggcataaggcgtgcagcatcgttgcccttatttctctgccatggtagaggtgatgatgtggttgcatatgaacatggggagaggtctgcagtgaccttaagttcatcagattccagaatcttatatttaggagctacaatgggttgggtcactatacagtcctga

SEQ ID NO: 331 - protein, 235 aa, Glycine max
MSYSGSSMSSGSGSSRRTFEFGRTHVVRPKGKHQATIVWLHGLGDNGSSWSQLLETLPLPNIKWICPTAPTRPVALFGGFPCTAWFDAGEISEEAPSDLEGLDASAAHVANLLSTEPPNIKLGIGGFSMGAATALYSATCHVLGHYGNGNIYPINLSAIVSLSGWLPCSRTLKNQIERSRDGIRRAASLPLFLCHGRGDDVVAYEHGERSAVTLSSSDSRILYLGATMGWVTIQS

SEQ ID NO: 332 - DNA, 777 bp, Glycine max
atgagctacagtggctcctcaatgagttctggtagtggatcttctagaaggacatttgagtttggaaggacccatgtggtcagacctaaagggaaacaccaggcaactatagtttggctacatggccttggtgataatggctcaagctggtcccaactcttggaaactcttcctcttccaaatattaaatggatttgcccaactgctcctacacggcctgtagccttatttggtggatttccttgcactgcttggtttgatgctggggagatttcagaagaagctcctagtgatttggaggggttagatgcttctgcagcacacgttgccaatcttttgtcaacagagcctccaaatatcaaacttggtattgggggcttcagtatgggtgctgcaactgcactatactcagctacatgccatgttttggggcactatggtaatggaaacatttaccctatcaacttaagtgctattgtttctttaagtggctggcttccttgttcaaggaccttgaaaaaccaaattgaacgatcacgtgatggcataaggcgtgcagcatcgttgcccttatttctctgccatggaagaggtgatgatgtggttgcatatgaacatggggagaggtctgcagtgaccttaagttcatcaggattccagaatcttatatttaggagctacaatgggttgggtcactatacagtccctgaagagactgatgaagtttgcaggtggctaactgcaaatttgggactggaggggtttcggttgaactag

SEQ ID NO: 333 - protein, 258 aa, Glycine max
MSYSGSSMSSGSGSSRRTFEFGRTHVVRPKGKHQATIVWLHGLGDNGSSWSQLLETLPLPNIKWICPTAPTRPVALFGGFPCTAWFDAGEISEEAPSDLEGLDASAAHVANLLSTEPPNIKLGIGGFSMGAATALYSATCHVLGHYGNGNIYPINLSAIVSLSGWLPCSRTLKNQIERSRDGIRRAASLPLFLCHGRGDDVVAYEHGERSAVTLSSSGFQNLIFRSYNGLGHYTVPEETDEVCRWLTANLGLEGFRLN

SEQ ID NO: 334 - DNA, 750 bp, Zea mays
  misc_feature (545)..(545): n is a, c, g, or t
atgatctatgggggcagctcttctggcgggagaggtgggcggcgtgtggagtacgggcggacgtacgtggtgaggcccaaggggaggcaccaggccaccattgtgtggctccatggcatcggagacaatggcggcagctggtcccatctcctgtattctcttccactgcccaatgtcaaatggatttgccctattgcaccaacgcggcctgtcgcggctttcggtggattcccttgcactgcatggttcgatgtggaagagacttcactggacggccactctgacatcaaaggcatggactcttcacccgcgcatgtggcgaacctgctgtcctccgagccatctgatgtgagccttgagataagagggttcagcatgggcgctgccgctgcgctccactccgccgcgtgctactctcacggcagattcaccaacggtgtcgcctatcagatcaacctcagggtcgtcgtcggtttgagtggctggcttcctagctccaggaccctaaggagcaagatcgagagctcgcagctcgcgcttcgaanagcttccggcttgccaatcctgctcagccatggaatggccgatgaggttgtcacctacaggaacggcgagaggtcagctgagattctacggagctcgggattccagtacacctacttcaaaccctacaacgggcttggtcactacactatccctgaagagatggacgacgtcagcaaggggctgaggtcaacgatgggactctga

SEQ ID NO: 335 - protein, 249 aa, Zea mays
  misc_feature (182)..(182): Xaa can be any naturally occurring amino acid
MIYGGSSSGGRGGRRVEYGRTYVVRPKGRHQATIVWLHGIGDNGGSWSHLLYSLPLPNVKWICPIAPTRPVAAFGGFPCTAWFDVEETSLDGHSDIKGMDSSPAHVANLLSSEPSDVSLEIRGFSMGAAAALHSAACYSHGRFTNGVAYQINLRVVVGLSGWLPSSRTLRSKIESSQLALRXASGLPILLSHGMADEVVTYRNGERSAEILRSSGFQYTYFKPYNGLGHYTIPEEMDDVSKGLRSTMGL

SEQ ID NO: 336 - DNA, 750 bp, Zea mays
atgatctatgggggcagctcttctggcgggagaggtgggcggcgtgtggagtacgggcggacgtacgtggtgaggcccaaggggaggcaccaggccaccattgtgtggctccatggcatcggagacaatggcggcagctggtcccagctcctggattctcttccactgcccaatgtcaaatggatttgccctactgcaccaacgcggcctgtcgcggctttcggtggattcccttgcactgcatggttcgatgtggacgagacttcactggacggccacgctgacatcgaaggcatggacgcttcagccgcgcatgtggcgaacctgctgtcctccgagccatctgatgtgagccttgggataggagggttcagcatgggcgctgccgctgcgctccactccgccgcgtgctacgctcacggcagattcaccaacggtgtcgcctatccgatcaacctcagggtcgtcgtcggtttgagtggctggcttcctagctccaggaccctaaggagcaagatcgagagctcgcagctcgcgcttcgaaaagcttccggcttgccaatcctgctcagccatggaatggccgatgaggttgtcacctacaggaacggcgagaggtcagctgagattctacggagctcgggattccagtacacctacttcaaaccctacaacgggcttggtcactacactatccctgaagagatggacgacgtcagcaagtggctgaggtcaacgctgggactctga

SEQ ID NO: 337 - protein, 249 aa, Zea mays
MIYGGSSSGGRGGRRVEYGRTYVVRPKGRHQATIVWLHGIGDNGGSWSQLLDSLPLPNVKWICPTAPTRPVAAFGGFPCTAWFDVDETSLDGHADIEGMDASAAHVANLLSSEPSDVSLGIGGFSMGAAAALHSAACYAHGRFTNGVAYPINLRVVVGLSGWLPSSRTLRSKIESSQLALRKASGLPILLSHGMADEVVTYRNGERSAEILRSSGFQYTYFKPYNGLGHYTIPEEMDDVSKWLRSTLGL

SEQ ID NO: 338 - DNA, 750 bp, Triticum aestivum
atgagctcctccggcgcccgcggtgtccgtcgagagtacggccggacctatgtggtgaggcccaaggggaggcacctggccaccattgtctggctccacggcataggcgacaacggaaacagctggtcccaggtgctgggcaatctcccgttggataatgtcaaatggatttgccctactgcgccaacgcggcccgtagcggccttcggtggattcccatgtactgcatggttcgatgtggaggagacttcggttgacggccccgacgacgtccaagggctggacgcatccgccgcacacatagcaaacctgctatcgtccgagccctctgatgtgaggcttgggataggcggtttcagcatgggagccgccactgcgctccactctgccgcatgttatgctcatggaaggttctcaaacggtgttgcctaccctattaccctcagcgctatcattgggttgagcggctggcttccctgctccaggaccctgaggaccaagattgagagctcacagactgctttcaggagggctgctgccttgccgataatgcttggccatggaagaggcgacgaggtagtcacgtacaggaacggcgagaggtcggccgagtttctgcggaattcgggcttttcgtacctgaatttcaaagcctacaacggactgggccatcacaccatccctgaggaaatggacgatgtctccaagtggctcagggcaaggctcgggcttgatcgctcttgcggctaa

SEQ ID NO: 339 - protein, 249 aa, Triticum aestivum
MSSSGARGVRREYGRTYVVRPKGRHLATIVWLHGIGDNGNSWSQVLGNLPLDNVKWICPTAPTRPVAAFGGFPCTAWFDVEETSVDGPDDVQGLDASAAHIANLLSSEPSDVRLGIGGFSMGAATALHSAACYAHGRFSNGVAYPITLSAIIGLSGWLPCSRTLRTKIESSQTAFRRAAALPIMLGHGRGDEVVTYRNGERSAEFLRNSGFSYLNFKAYNGLGHHTIPEEMDDVSKWLRARLGLDRSCG

SEQ ID NO: 340 - DNA, 750 bp, Zea mays
atgagctatgggggcagctcttctggcgggcgaggtgggcggcgtgtggagtacgggcggacgtacgtggtgaggcccaaggggaggcaccaggccaccattgtgtggctccatggcatcggcgacaatggcggcagctggtcccagctcctggattctcttccactgcccaatgtcaaatggatttgccctactgcaccaacgcggcctgtcgcggctttcggtggattcccttgcactgcatggttcgatgtggacgagacttcactggacggccacgctgacatcgaaggcatggacgcttcagccgcgcatgtggcgaacctgctgtcctccgagccatctgatgtgagccttgggataggagggttcagcatgggcgctgccgctgcgctccactccgccgcgtgctacgctcacggcagattcaccaacggtgtcgcctatccgatcaacctcagggtcgtcgtcggtttgagtggctggcttcctagctccaggaccctaaggagcaagatcgagagctcgcagctcgcgcttcgaaaagcttccggcttgccaatcctgctcagccatggaatggccgatgaggttgtcacctacaggaacggcgagaggtcagctgagattctacggagctcgggattccagtacacctacttcaaaccctacaacgggcttggtcactacactatccctgaagagatggacgacgtcagcaagtggctgaggtcaacgctgggactctga

SEQ ID NO: 341 - protein, 249 aa, Zea mays
MSYGGSSSGGRGGRRVEYGRTYVVRPKGRHQATIVWLHGIGDNGGSWSQLLDSLPLPNVKWICPTAPTRPVAAFGGFPCTAWFDVDETSLDGHADIEGMDASAAHVANLLSSEPSDVSLGIGGFSMGAAAALHSAACYAHGRFTNGVAYPINLRVVVGLSGWLPSSRTLRSKIESSQLALRKASGLPILLSHGMADEVVTYRNGERSAEILRSSGFQYTYFKPYNGLGHYTIPEEMDDVSKWLRSTLGL

SEQ ID NO: 342 - DNA, 765 bp, Oryza sativa
atgagctacgggagcagctcttctggggggcgaggcgggcggcgggtggagtacgggaggacgtacgtggtgaggcccaaggggaggcaccaggccaccattgtgtggctccatggcctcggcgacaatggcgcaagctggtcccagctactggattctcttcctctgcctaatatcaaatggatttgccctactgcaccaacacgccctgttgctgctttcggtggattcccttgcacagcatggtttgatgtggaggacacttccgtggatggccgtgatgatattgaagggcttgatgcttcagctgcacacgttgcaaacctactgtcatccgagccatctgatgtgaagcttgggataggtggtttcagcatgggtgctgccgctgccctccactctgctgcatgctatgctcatggaagattcacaaacggcgttgcctacccggtcaccctcagcgccgtcatcggtttgagcggttggcttccctgttcaaggactctgaagagcaagatggacagctctcagactgcactgagaagggctggtgccttaccaatcctgctcagccatggaagagctgatgaggttgtcacctacagaaatggtgagaaatcagccgatttcctgcgaggctcgggttttcagtatctgaattttaaaccctacaacggcctggggcattataccatccctgaagaaatggacgatgtctgcaagtggctcagttcaaggctgggacttgaccgatcccgcggctaa

SEQ ID NO: 343 - protein, 254 aa, Oryza sativa
MSYGSSSSGGRGGRRVEYGRTYVVRPKGRHQATIVWLHGLGDNGASWSQLLDSLPLPNIKWICPTAPTRPVAAFGGFPCTAWFDVEDTSVDGRDDIEGLDASAAHVANLLSSEPSDVKLGIGGFSMGAAAALHSAACYAHGRFTNGVAYPVTLSAVIGLSGWLPCSRTLKSKMDSSQTALRRAGALPILLSHGRADEVVTYRNGEKSADFLRGSGFQYLNFKPYNGLGHYTIPEEMDDVCKWLSSRLGLDRSRG

SEQ ID NO: 344 - DNA, 705 bp, Oryza sativa
atgagttactatggaagcagttcttctggtggacggggtggtcagagagttgagtacgggaggacctatgtggtgaggccaaagggaaggcaccaagccaccattgtgtggcttcatggcctaggtgacaatggtgcaagctggtcccaactcctggattctctttcattgccaaatatcaagtggatttgccccaccgcagcaacccagcctgtcacagcatttggtggattcccttgcactgcatggtttgatgtggaggatacttcagtggatggccgtgacgacattgaaggactggatgcttcagctgcgcacattgcaaacttgctgtcgtcagagccgcctgatgtgaagcttgggattggtggtttcagcatgggtgctgctgcttccctctactcagctgcgtgctatgctcatggcaaattcgcaagtggcatcccctacccaatcacacttagcgcggtcatcagcttgagtggatggctcccttgctccaggaccctgaggggcaagatggagagctcacacatagctgcaagaagagctgcctccttgcctatcttacttagccatggaagagcggatgaggttgtatcctacaggaatgctgagaggctaggccactataccatccctgaagagatggacgacgttggcaagtggctcagctcaaggcttggcctcgacagatcccgctaa

SEQ ID NO: 345 - protein, 234 aa, Oryza sativa
MSYYGSSSSGGRGGQRVEYGRTYVVRPKGRHQATIVWLHGLGDNGASWSQLLDSLSLPNIKWICPTAATQPVTAFGGFPCTAWFDVEDTSVDGRDDIEGLDASAAHIANLLSSEPPDVKLGIGGFSMGAAASLYSAACYAHGKFASGIPYPITLSAVISLSGWLPCSRTLRGKMESSHIAARRAASLPILLSHGRADEVVSYRNAERLGHYTIPEEMDDVGKWLSSRLGLDRSR

SEQ ID NO: 346 - DNA, 765 bp, Zea mays
atgagctattatggcagcagctcttctggtggacgaagcagtaggagagtcgactatgggaggacatatgtggtgaggccaaagggaaggcacctagccaccattgtgtggctccatggcataggtgacaatggtgctagctggtcccagctcctggattctcttcctctaccaaatatcaagtggatatgccccactgctgcaacccggcctgtcgcggcttttggtggattcccctgcacagcatggtttgacgttgaggacacatctatagatggccgagacgacattgagggactggatgcttcagctgcacacattgcaaatctgctgtcgtctgagccgtctgatgtgaagcttgggattggcggtttcagcatgggcgccgccgttgcccttcactcagcagcatgctatgctcatggcaaattcacaagtggcattccctatccaatcgcactcaacgcagtcatcagtttgagtggctggctcccttgctcaaggaccctgaggagcaagatggagggttcacatattgctgtaagaagggctggctccttgcccatcctgcttagtcatggaagagtggatgaagttgtcgtctacagggatggcgagagatcagctgaggttctgaggaactcaggattctcatttctgactttcaagccctacaacgggttgggccattatacgatccctgaagaactggacgacctctgcaagtggcttagctcgtcgcttggcctcggccgatctcgctaa

SEQ ID NO: 347 - protein, 254 aa, Zea mays
MSYYGSSSSGGRSSRRVDYGRTYVVRPKGRHLATIVWLHGIGDNGASWSQLLDSLPLPNIKWICPTAATRPVAAFGGFPCTAWFDVEDTSIDGRDDIEGLDASAAHIANLLSSEPSDVKLGIGGFSMGAAVALHSAACYAHGKFTSGIPYPIALNAVISLSGWLPCSRTLRSKMEGSHIAVRRAGSLPILLSHGRVDEVVVYRDGERSAEVLRNSGFSFLTFKPYNGLGHYTIPEELDDLCKWLSSSLGLGRSR

SEQ ID NO: 348 - protein, 50 aa, Artificial sequence
  motif 14
  VARIANT (2)..(2): Xaa can be Phe or Tyr
  VARIANT (4)..(4): Xaa can be Lys or Arg
  VARIANT (6)..(6): Xaa can be His or Tyr
  VARIANT (13)..(13): Xaa can be Lys or Arg
  VARIANT (29)..(29): Xaa can be Leu, Ser or Ala
  VARIANT (31)..(31): Xaa can be Ser of Trp
  VARIANT (36)..(36): Xaa can be Glu or Asp
  VARIANT (37)..(37): Xaa can be Ser or Thr"
EXGXTXVVRPKGXHQATIVWLHGLGDNGXSXSQLLXXLPLPNIKWICPTA

SEQ ID NO: 349 - protein, 30 aa, Artificial sequence
  motif 15
  VARIANT (4)..(4): Xaa can be Trp, Ile, Val or Leu
  VARIANT (14)..(14): Xaa can be Ile or Val
  VARIANT (20)..(20): Xaa can be Thr or Ser
  VARIANT (23)..(23): Xaa can be Ala or Ser
  VARIANT (25)..(25): Xaa can be Val or Ile
  VARIANT (27)..(27): Xaa can be Val or Leu
  VARIANT (29)..(29): Xaa can be Ile or Val
PDDXEGLDASAAHXANLLSXEPXDXKXGXG

SEQ ID NO: 350 - protein, 17 aa, Artificial sequence
  motif 16
  VARIANT (7)..(7): Xaa can be Ile or Thr
  VARIANT (13)..(13): Xaa can be Thr or Ala
  VARIANT (15)..(15): Xaa can be Tyr or Phe
  VARIANT (17)..(17): Xaa can be Met, His or Leu
FSMGAAXALYSAXCXAX

SEQ ID NO: 351 - protein, 50 aa, Artificial sequence
  motif 17
  VARIANT (2)..(2): Xaa can be Phe or Tyr
  VARIANT (4)..(4): Xaa can be Lys or Arg
  VARIANT (6)..(6): Xaa can be His or Tyr
  VARIANT (15)..(15): Xaa can be Gln or Lys
  VARIANT (29)..(29): Xaa can be Leu or Ser
  VARIANT (31)..(31): Xaa can be Ser or Trp
  VARIANT (37)..(37): Xaa can be Ser or Thr
EXGXTXVVRPKGKHXATIVWLHGLGDNGXSXSQLLEXLPLPNIKWICPTA

SEQ ID NO: 352 - protein, 29 aa, Artificial sequence
  motif 18
  VARIANT (3)..(3): Xaa can be Gly or Ala
  VARIANT (7)..(7): Xaa can be Trp, Leu or Val
  VARIANT (13)..(13): Xaa can be Ser or Ala
  VARIANT (17)..(17): Xaa can be Ile or Val
  VARIANT (27)..(27): Xaa can be Asp or Asn
  VARIANT (28)..(28): Xaa can be Val or Ile
EDXPDDXEGLDAXAAHXANLLSTEPAXXK

SEQ ID NO: 353 - protein, 11 aa, Artificial sequence
  motif 19
  VARIANT (1)..(1): Xaa can be Leu or Phe
  VARIANT (6)..(6): Xaa can be Cys or Ser
XGGFPXTAWFD

SEQ ID NO: 354 - protein, 50 aa, Artificial sequence
  motif 20
  VARIANT (2)..(2): Xaa can be His or Tyr
  VARIANT (9)..(9): Xaa can be Lys or Arg
  VARIANT (20)..(20): Xaa can be Leu or Ile
  VARIANT (25)..(25): Xaa can be Leu, Ala or Gly
  VARIANT (27)..(27): Xaa can be Ser or Trp
  VARIANT (32)..(32): Xaa can be Glu or Asp
  VARIANT (39)..(39): Xaa can be Ile or Val
  VARIANT (48)..(48): Xaa can be Thr or Ser
TXVVRPKGXHQATIVWLHGXGDNGXSXSQLLXSLPLPNXKWICPTAPXRP

SEQ ID NO: 355 - protein, 50 aa, Artificial sequence
  motif 21
  VARIANT (10)..(10): Xaa can be Gly or Glu
  VARIANT (11)..(11): Xaa can be Glu or Asp
  VARIANT (12)..(12): Xaa can be Leu or Thr
  misc_feature (14)..(14): Xaa can be any naturally occurring amino acid
  VARIANT (15)..(15): Xaa can be Glu, Leu or Val
  misc_feature (17)..(17): Xaa can be any naturally occurring amino acid
  VARIANT (18)..(18): Xaa can be Pro, His or Arg
  misc_feature (20)..(20): Xaa can be any naturally occurring amino acid
  VARIANT (21)..(21): Xaa can be Trp or Ile
  misc_feature (23)..(23): Xaa can be any naturally occurring amino acid
  VARIANT (24)..(24): Xaa can be Leu or Met
  misc_feature (28)..(28): Xaa can be any naturally occurring amino acid
  VARIANT (29)..(29): Xaa can be Ala or Ser
  misc_feature (30)..(30): Xaa can be any naturally occurring amino acid
  VARIANT (31)..(31): Xaa can be Ile or Val
  misc_feature (36)..(36): Xaa can be any naturally occurring amino acid
  VARIANT (37)..(37): Xaa can be Thr or Ser
  misc_feature (39)..(39): Xaa can be any naturally occurring amino acid
  VARIANT (40)..(40): Xaa can be Ala or Ser
  misc_feature (42)..(42): Xaa can be any naturally occurring amino acid
  VARIANT (43)..(43): Xaa can be Lys or Ser
  VARIANT (44)..(44): Xaa can be Val or Leu
FPCTAWFDVXXXSXDGXDDXEGXDASAXHXANLLSXEPXDVXXGIGGFSM

SEQ ID NO: 356 - protein, 21 aa, Artificial sequence
  motif 22
  VARIANT (3)..(3): Xaa can be Ser or Pro
  VARIANT (5)..(5): Xaa can be Glu, Asn or Asp
  VARIANT (7)..(7): Xaa can be Ile or Leu
  VARIANT (12)..(12): Xaa can be Val or Ile
  VARIANT (14)..(14): Xaa can be Arg or Glu
  VARIANT (17)..(17): Xaa can be Gly or Asp
  VARIANT (18)..(18): Xaa can be Glu or Asp
  VARIANT (20)..(20): Xaa can be Ser or Cys
  VARIANT (21)..(21): Xaa can be Thr, Lys or Asn
FKXYXGXGHYTXPXEMXXVXX

SEQ ID NO: 357 - protein, 50 aa, Artificial sequence
  motif 23
  VARIANT (3)..(3): Xaa can be Ser or Pro
  VARIANT (4)..(4): Xaa can be Lys or Arg
  VARIANT (6)..(6): Xaa can be His or Tyr
  VARIANT (29)..(29): Xaa can be Leu or Ser
  VARIANT (32)..(32): Xaa can be Ser or Tyr
EFGXTXVVRPKGKHQATIVWLHGLGDNGXSSXQLLESLPLPNIKWICPTA

SEQ ID NO: 358 - protein, 29 aa, Artificial sequence
  motif 24
  VARIANT (5)..(5): Xaa can be Pro or His
  VARIANT (16)..(16): Xaa can be Ala or Ser
SEDGXDDWEGLDASAXHIANLLSTEPADV

SEQ ID NO: 359 - protein, 32 aa, Artificial sequence
  motif 25
  VARIANT (2)..(2): Xaa can be Ile or Thr
  VARIANT (8)..(8): Xaa can be Leu or Pro
  VARIANT (10)..(10): Xaa can be Lys or Arg
  VARIANT (11)..(11): Xaa can be Tyr or Phe
  VARIANT (21)..(21): Xaa can be Ser or Met
  VARIANT (27)..(27): Xaa can be Val or Ile
  VARIANT (28)..(28): Xaa can be Ala, Met or Thr
  VARIANT (31)..(31): Xaa can be Ser or Pro
GXSDDVVXYXXGEKSAQSLSXAGFRYXXFKXY

SEQ ID NO: 360 - DNA, 3362 bp, Artificial sequence
  expression cassette
aatccgaaaagtttctgcaccgttttcaccccctaactaacaatatagggaacgtgtgctaaatataaaatgagaccttatatatgtagcgctgataactagaactatgcaagaaaaactcatccacctactttagtggcaatcgggctaaataaaaaagagtcgctacactagtttcgttttccttagtaattaagtgggaaaatgaaatcattattgcttagaatatacgttcacatctctgtcatgaagttaaattattcgaggtagccataattgtcatcaaactcttcttgaataaaaaaatctttctagctgaactcaatgggtaaagagagagattttttttaaaaaaatagaatgaagatattctgaacgtattggcaaagatttaaacatataattatataattttatagtttgtgcattcgtcatatcgcacatcattaaggacatgtcttactccatcccaatttttatttagtaattaaagacaattgacttatttttattatttatcttttttcgattagatgcaaggtacttacgcacacactttgtgctcatgtgcatgtgtgagtgcacctcctcaatacacgttcaactagcaacacatctctaatatcactcgcctatttaatacatttaggtagcaatatctgaattcaagcactccaccatcaccagaccacttttaataatatctaaaatacaaaaaataattttacagaatagcatgaaaagtatgaaacgaactatttaggtttttcacatacaaaaaaaaaaagaattttgctcgtgcgcgagcgccaatctcccatattgggcacacaggcaacaacagagtggctgcccacagaacaacccacaaaaaacgatgatctaacggaggacagcaagtccgcaacaaccttttaacagcaggctttgcggccaggagagaggaggagaggcaaagaaaaccaagcatcctcctcctcccatctataaattcctccccccttttcccctctctatataggaggcatccaagccaagaagagggagagcaccaaggacacgcgactagcagaagccgagcgaccgccttcttcgatccatatcttccggtcgagttcttggtcgatctcttccctcctccacctcctcctcacagggtatgtgcccttcggttgttcttggatttattgttctaggttgtgtagtacgggcgttgatgttaggaaaggggatctgtatctgtgatgattcctgttcttggatttgggatagaggggttcttgatgttgcatgttatcggttcggtttgattagtagtatggttttcaatcgtctggagagctctatggaaatgaaatggtttagggtacggaatcttgcgattttgtgagtaccttttgtttgaggtaaaatcagagcaccggtgattttgcttggtgtaataaaagtacggttgtttggtcctcgattctggtagtgatgcttctcgatttgacgaagctatcctttgtttattccctattgaacaaaaataatccaactttgaagacggtcccgttgatgagattgaatgattgattcttaagcctgtccaaaatttcgcagctggcttgtttagatacagtagtccccatcacgaaattcatggaaacagttataatcctcaggaacaggggattccctgttcttccgatttgctttagtcccagaattttttttcccaaatatcttaaaaagtcactttctggttcagttcaatgaattgattgctacaaataatgcttttatagcgttatcctagctgtagttcagttaataggtaatacccctatagtttagtcaggagaagaacttatccgatttctgatctccatttttaattatatgaaatgaactgtagcataagcagtattcatttggattattttttttattagctctcaccccttcattattctgagctgaaagtctggcatgaactgtcctcaattttgttttcaaattcacatcgattatctatgcattatcctcttgtatctacctgtagaagtttctttttggttattccttgactgcttgattacagaaagaaatttatgaagctgtaatcgggatagttatactgcttgttcttatgattcatttcctttgtgcagttcttggtgtagcttgccactttcaccagcaaagttcatttaaatcaactagggatatcacaagtttgtacaaaaaagcaggcttaaacatgagtcacgcgcattctcatatcggctccggtagtagaactactcgacgaacttttgaattcgggaagacacatgtagtgaggcctaaaggaaaacatcaagctactatagtttggttgcatggacttggtgataatggtttgagctcatctcagttgttggaatcacttccacttccaaatataaaatggatttgccctactgctcctacccgtcccgtggcgatacttggtggttttccctgcactgcatggtttgatgtgggagagctttcggaagatggtccagatgattgggagggtttagatgcttcagcagcacatattgctaacttgttgtcaacagagccagcagatgtgaaagttggtattggagggttcagcatgggtgcagcaatagcattatactctgcaacatgctatgccatgggaaggtatggaaatggcatcccatatcctgtcaatttaagagcagttgttggactcagtggttggcttccaggatcaaggagcttagggaacaagatagaagtgtcacatgaagcgagaaggcgagctgcttcattaccaattttacagtgtcacggaatcagtgatgatgtagtccactgtaagtatggagagaaatctgctcaatcattaagttcagcagggtttcgatatgttgcattcaaatcctatgaagggattggtcattacacagttccaagagagatgggtgaagtttccacctggcttagttcaaggttgggacttgaaggattttcgtcgtaaacccagctttcttgtacaaagtggtgatatcacaagcccgggcggtcttctagggataacagggtaattatatccctctagatcacaagcccgggcggtcttctacgatgattgagtaataatgtgtcacgcatcaccatgggtggcagtgtcagtgtgagcaatgacctgaatgaacaattgaaatgaaaagaaaaaaagtactccatctgttccaaattaaaattcattttaaccttttaataggtttatacaataattgatatatgttttctgtatatgtctaatttgttatcatccgggcggtcttctagggataacagggtaattatatccctctaga

SEQ ID NO: 361 - DNA, 3319 bp, Oryza sativa
aatccgaaaagtttctgcaccgttttcaccccctaactaacaatatagggaacgtgtgctaaatataaaatgagaccttatatatgtagcgctgataactagaactatgcaagaaaaactcatccacctactttagtggcaatcgggctaaataaaaaagagtcgctacactagtttcgttttccttagtaattaagtgggaaaatgaaatcattattgcttagaatatacgttcacatctctgtcatgaagttaaattattcgaggtagccataattgtcatcaaactcttcttgaataaaaaaatctttctagctgaactcaatgggtaaagagagagattttttttaaaaaaatagaatgaagatattctgaacgtattggcaaagatttaaacatataattatataattttatagtttgtgcattcgtcatatcgcacatcattaaggacatgtcttactccatcccaatttttatttagtaattaaagacaattgacttatttttattatttatcttttttcgattagatgcaaggtacttacgcacacactttgtgctcatgtgcatgtgtgagtgcacctcctcaatacacgttcaactagcaacacatctctaatatcactcgcctatttaatacatttaggtagcaatatctgaattcaagcactccaccatcaccagaccacttttaataatatctaaaatacaaaaaataattttacagaatagcatgaaaagtatgaaacgaactatttaggtttttcacatacaaaaaaaaaaagaattttgctcgtgcgcgagcgccaatctcccatattgggcacacaggcaacaacagagtggctgcccacagaacaacccacaaaaaacgatgatctaacggaggacagcaagtccgcaacaaccttttaacagcaggctttgcggccaggagagaggaggagaggcaaagaaaaccaagcatcctcctcctcccatctataaattcctccccccttttcccctctctatataggaggcatccaagccaagaagagggagagcaccaaggacacgcgactagcagaagccgagcgaccgccttcttcgatccatatcttccggtcgagttcttggtcgatctcttccctcctccacctcctcctcacagggtatgtgcccttcggttgttcttggatttattgttctaggttgtgtagtacgggcgttgatgttaggaaaggggatctgtatctgtgatgattcctgttcttggatttgggatagaggggttcttgatgttgcatgttatcggttcggtttgattagtagtatggttttcaatcgtctggagagctctatggaaatgaaatggtttagggtacggaatcttgcgattttgtgagtaccttttgtttgaggtaaaatcagagcaccggtgattttgcttggtgtaataaaagtacggttgtttggtcctcgattctggtagtgatgcttctcgatttgacgaagctatcctttgtttattccctattgaacaaaaataatccaactttgaagacggtcccgttgatgagattgaatgattgattcttaagcctgtccaaaatttcgcagctggcttgtttagatacagtagtccccatcacgaaattcatggaaacagttataatcctcaggaacaggggattccctgttcttccgatttgctttagtcccagaattttttttcccaaatatcttaaaaagtcactttctggttcagttcaatgaattgattgctacaaataatgcttttatagcgttatcctagctgtagttcagttaataggtaatacccctatagtttagtcaggagaagaacttatccgatttctgatctccatttttaattatatgaaatgaactgtagcataagcagtattcatttggattattttttttattagctctcaccccttcattattctgagctgaaagtctggcatgaactgtcctcaattttgttttcaaattcacatcgattatctatgcattatcctcttgtatctacctgtagaagtttctttttggttattccttgactgcttgattacagaaagaaatttatgaagctgtaatcgggatagttatactgcttgttcttatgattcatttcctttgtgcagttcttggtgtagcttgccactttcaccagcaaagttcatttaaatcaactagggatatcacaagtttgtacaaaaaagcaggcttaaacatgagtcacgcgcattctcatatcggctccggtagtagaactactcgacgaacttttgaattcgggaagacacatgtagtgaggcctaaaggaaaacatcaagctactatagtttggttgcatggacttggtgataatggtttgagctcatctcagttgttggaatcacttccacttccaaatataaaatggatttgccctactgctcctacccgtcccgtggcgatacttggtggttttccctgcactgcatggtttgatgtgggagagctttcggaagatggtccagatgattgggagggtttagatgcttcagcagcacatattgctaacttgttgtcaacagagccagcagatgtgaaagttggtattggagggttcagcatgggtgcagcaatagcattatactctgcaacatgctatgccatgggaaggtatggaaatggcatcccatatcctgtcaatttaagagcagttgttggactcagtggttggcttccaggatcaaggagcttagggaacaagatagaagtgtcacatgaagcgagaaggcgagctgcttcattaccaattttacagtgtcacggaatcagtgatgatgtagtccactgtaagtatggagagaaatctgctcaatcattaagttcagcagggtttcgatatgttgcattcaaatcctatgaagggattggtcattacacagttccaagagagatgggtgaagtttccacctggcttagttcaaggttgggacttgaaggattttcgtcgtaaacccagctttcttgtacaaagtggtgatatcacaagcccgggcggtcttctagggataacagggtaattatatccctctagatcacaagcccgggcggtcttctacgatgattgagtaataatgtgtcacgcatcaccatgggtggcagtgtcagtgtgagcaatgacctgaatgaacaattgaaatgaaaagaaaaaaagtactccatctgttccaaattaaaattcattttaaccttttaataggtttatacaataattgatatatgttttctgtatatgtctaatttgttatcatcc

SEQ ID NO: 362 - DNA, 54 bp, Artificial sequence
  primer: prm15409
ggggacaagtttgtacaaaaaagcaggcttaaacaatgagtcacgcgcattctc

SEQ ID NO: 363 - DNA, 53 bp, Artificial sequence
  primer: prm15410
ggggaccactttgtacaagaaagctgggtaaaatagttttgtcatttacgacg

SEQ ID NO: 364 - DNA, 56 bp, Artificial sequence
  primer: prm15411
ggggacaagtttgtacaaaaaagcaggcttaaacaatgagctattctcgtcaaagc

SEQ ID NO: 365 - DNA, 50 bp, Artificial sequence
  primer: prm15412
ggggaccactttgtacaagaaagctgggttgctgagaagatgcttgtaaa

SEQ ID NO: 366 - protein, 40 aa, Artificial Sequence
  motif 1
NLVKNGDFEEGPWMFPNTSWGVLLPPNLEDETSPLPGWII

SEQ ID NO: 367 - protein, 25 aa, Artificial
  motif 2
VEKGSLYSLTFSAARTCAQDESLNV

SEQ ID NO: 368 - protein, 14 aa, Artificial sequence
  motif 3
DPACGPLIDAVAIK

SEQ ID NO: 369 - protein, 29 aa, Artificial sequence
  motif 4
NMLKNGDFEEGPYIFPGTSWGVLVPPMDE

SEQ ID NO: 370 - protein, 29 aa, Artificial sequence
  motif 5
NVSVSPESGVLPIQTVYTSSGWDSYSWAF

SEQ ID NO: 371 - protein, 15 aa, Artificial sequence
  motif 6
YSITFSAARTCAQAE

SEQ ID NO: 372 - protein, 50 aa, Artificial sequence
  motif7
CREEGVDQVFVDAAHAIGQVPVDVKEIGADFYTSNLHKWFFCPPSVAFLY

SEQ ID NO: 373 - protein, 50 aa, Artificial sequence
  motif 8
  MISC_FEATURE (46)..(46): Xaa can be can be any naturally-occurring amino acid
EFSHHDPGVARINNGSFGCCPASVLAAQARWQLLFLRQPDAFYFNXLQPG

SEQ ID NO: 374 - protein, 50 aa, Artificial sequence
  motif 9
SLVDNATTAAAIVLQHVAWAFAEGRFAKGDAVLMLHYAYGAVKKSIEAYV
